(19) United States
(12) Patent Application Publication
(10) Pub. No.: US 2022/0033814 A1
(43) Pub. Date: Feb. 3, 2022

(54) METHODS FOR THE TREATMENT OF TRINUCLEOTIDE REPEAT EXPANSION DISORDERS ASSOCIATED WITH MLH1 ACTIVITY

(71) Applicant: TRIPLET THERAPEUTICS, INC., Cambridge, MA (US)

(72) Inventors: Nessan Anthony BERMINGHAM, Cambridge, MA (US); Brian R. BETTENCOURT, Cambridge, MA (US); Peter Edward BIALEK, Cambridge, MA (US)

(21) Appl. No.: 17/299,278

(22) PCT Filed: Dec. 2, 2019
(86) PCT No.: PCT/US2019/064058

§ 371 Date: Jun. 2, 2021

Related U.S. Application Data
(60) Provisional application No. 62/774,771, filed on Dec. 3, 2018.
(60) Provisional application No. 62/778,686, filed on Dec. 12, 2018.
(60) Provisional application No. 62/876,987, filed on Jul. 22, 2019.

(51) Int. Cl. C12N 15/113; A61P 25/28; A61K 31/7088; A61K 31/713

(52) U.S. Cl. CPC C12N 15/113; A61P 25/28; A61K 31/7088; A61K 31/713; C12N 2310/11; C12N 2310/322; C12N 2310/321; C12N 2310/351; C12N 2320/32; C12N 2310/315; C12N 2310/346; C12N 2310/3231

(57) ABSTRACT

The present disclosure features useful compositions and methods to treat repeat expansion disorders, e.g., in a subject in need thereof. In some aspects, the compositions and methods described herein are useful in the treatment of disorders associated with MLH1 activity.

### INCORPORATION BY REFERENCE OF SEQUENCE LISTING

[0001] The contents of the text file named “4398_005 PC03_Seqlisting_ST25.txt,” which was created on Nov. 24, 2019 and is 694,786 bytes in size, are hereby incorporated by reference in their entireties.

### BACKGROUND

[0002] Trinucleotide repeat expansion disorders are genetic disorders caused by trinucleotide repeat expansions. Trinucleotide repeat expansions are a type of genetic mutation where nucleotide repeats in certain genes or introns exceed the normal, stable threshold for that gene. The trinucleotide repeats can result in defective or toxic gene products, impair RNA transcription, and/or cause toxic effects by forming toxic mRNA transcripts.

[0003] Trinucleotide repeat expansion disorders are generally categorized by the type of repeat expansion. For example, Type 1 disorders such as Huntington's disease are caused by CAG repeats which result in a series of glutamine residues known as a polyglutamine tract, Type 2 disorders are caused by heterogeneous expansions that are generally small in magnitude, and Type 3 disorders such as fragile X syndrome are characterized by large repeat expansions that are generally located outside of the protein coding region of the genes. Trinucleotide repeat expansion disorders are characterized by a wide variety of symptoms such as progressive degeneration of nerve cells that is common in the Type 1 disorders.

[0004] Subjects with a trinucleotide repeat expansion disorder or those who are considered at risk for developing a trinucleotide repeat expansion disorder have a constitutive nucleotide expansion in a gene associated with disease (i.e., the trinucleotide repeat expansion is present in the gene during embryogenesis). Constitutive trinucleotide repeat expansions can undergo expansion after embryogenesis (i.e., somatic trinucleotide repeat expansion). Both constitutive trinucleotide repeat expansion and somatic trinucleotide repeat expansion can be associated with presence of disease, age at onset of disease, and/or rate of progression of disease.

### SUMMARY OF THE DISCLOSURE

[0005] The present disclosure features useful compositions and methods to treat trinucleotide repeat expansion disorders, e.g., in a subject in need thereof. In some aspects, the compositions and methods described herein are useful in the treatment of disorders associated with MLH1 activity. Such compositions include administering an antisense oligonucleotide (“ASO”) or a dsRNA (e.g., siRNA or shRNA).

### Antisense Oligonucleotides

[0006] In some aspects, a single-stranded antisense oligonucleotide of 10-30 linked nucleosides in length, wherein the antisense oligonucleotide comprises a region of at least 10 contiguous nucleobases having at least 80% complementarity to an MLH1 gene are provided. In some aspects, the antisense oligonucleotide comprises:

[0007] (a) a DNA core sequence comprising linked deoxyribonucleosides;

[0008] (b) a 5′ flanking sequence comprising linked nucleosides; and

[0009] (c) a 3′ flanking sequence comprising linked nucleosides;

[0010] wherein the DNA core comprises a region of at least 10 contiguous nucleobases having at least 80% complementarity to an MLH1 gene and is positioned between the 5′ flanking sequence and the 3′ flanking sequence; wherein the 5′ flanking sequence and the 3′ flanking sequence each comprises at least two linked nucleosides; and wherein at least one nucleoside of each flanking sequence comprises an alternative nucleoside.

[0011] In some aspects, a single-stranded antisense oligonucleotide of 10-30 linked nucleosides in length for inhibiting expression of a human MLH1 gene in a cell, wherein the antisense oligonucleotide comprises a region of at least 10 contiguous nucleobases having at least 80% complementarity to an MLH1 gene is provided herein. In some aspects, the antisense oligonucleotide comprises:

[0012] (a) a DNA core comprising linked deoxyribonucleosides;

[0013] (b) a 5′ flanking sequence comprising linked nucleosides; and

[0014] (c) a 3′ flanking sequence comprising linked nucleosides;

wherein the DNA core comprises a region of at least 10 contiguous nucleobases having at least 80% complementarity to an MLH1 gene and is positioned between the 5′ flanking sequence and the 3′ flanking sequence; wherein the 5′ flanking sequence and the 3′ flanking sequence each comprises at least two linked nucleosides; and wherein at least one nucleoside of each flanking sequence comprises an alternative nucleoside.

[0015] In some aspects, the region of at least 10 nucleobases has at least 90% complementary to an MLH1 gene. In some aspects, the region of at least 10 nucleobases has at least 95% complementary to an MLH1 gene.

[0016] In some aspects, the region of at least 10 nucleobases is complementary to an MLH1 gene corresponding to a sequence of reference mRNA NM_000249.3 at one or more of positions 193-258, 289-607, 629-734, 757-836, 865-1125, 1177-1206, 1218-1286, 1324-1408, 1433-1747, 1759-1814, 1852-1901, 1959-2029, 2053-2240, 2250-2356, 2382-2479, 2510-2546, or 2573-2598 of the MLH1 gene. In some aspects, the region of at least 10 nucleobases is complementary to an MLH1 gene corresponding to a sequence of reference mRNA NM_000249.3 at one or more of positions 193-251, 289-607, 629-734, 757-836, 865-1125, 1177-1206, 1218-286, 1324-1408, 1433-1747, 1759-1814, 1852-1901, 1959-2029, 2053-2240, 2250-2356, 2382-2479, 2510-2546, or 2573-2598 of the MLH1 gene. In some aspects, the region of at least 10 nucleobases is complementary to an MLH1 gene corresponding to a sequence of reference mRNA NM_000249.3 at one or more of positions 193-251, 289-607, 629-734, 758-836, 865-1125, 1177-1206, 1218-1286, 1324-1408, 1433-1747, 1759-1814, 1852-1901, 1959-2029, 2053-2240, 2250-2356, 2382-2479, 2510-2546, or 2573-2598 of the MLH1 gene. In some aspects, the region of at least 10 nucleobases is complementary to an MLH1 gene corresponding to a sequence of reference mRNA NM_000249.3 at one or more of positions 312-391, 410-508, 522-607, 629-726, 759-1125, 1177-1206, 1221-1286, 1324-1407, 1433-1747, 1764-1814, 1854-1901, 1959-2029, 2053-2113, 2184-2240, 2251-2283, 2303-2351, 2384-2479, or 2510-2546 of the MLH1 gene. In some aspects, the region of at least 10 nucleobases is complementary to an MLH1 gene corresponding to a sequence of reference mRNA NM_000249.3 at one or more of positions 575-602, 662-724, 805-830, 891-960, 1002-1027, 1056-1081, 1100-1125, 1342-1384, 1443-1498, 1513-1561, 1600-1625, 1652-1747, 1876-1901, 2001-2026, or 2430-2459 of the MLH1 gene. In some aspects, the region of at least 10 nucleobases is complementary to an MLH1 gene corresponding to a sequence of reference mRNA NM_000249.3 at one or more of positions 307-332, 458-500, 571-602, 758-787, 865-890, 892-917, 1045-1084, 1624-1649, 1786-1813, 1871-1901, 2053-2081, 2086-2114, or 2149-2176 of the MLH1 gene.

[0017] In some aspects, the antisense oligonucleotide comprises the nucleobase sequence of any one of SEQ ID NOs: 6-1393. In some aspects, the antisense oligonucleotide comprises the nucleobase sequence of any one of SEQ ID NOs: 81-84, 86-87, 90, 99-101, 106-107, 111, 113-114, 117, 122-126, 129-131, 137-138, 140, 144, 146-160, 172, 188-191, 211, 215-220, 222-226, 229, 231-239, 242-249, 270-271, 274-279, 286-293, 295-298, 310-320, 322-328, 332-335, 337, 345, 383-388, 397-402, 405-413, 415-421, 458, 473-474, 476-478, 482-487, 490-491, 493-494, 497-501, 522-526, 528-530, 542, 545-549, 551-560, 563-565, 585-586, 596-598, 600-610, 613, 619-622, 631-634, 636-637, 639-643, 645-646, 649-651, 655, 699, 701-709, 714-715, 729-731, 733-741, 744, 749, 752-754, 757, 765-766, 768-769, 788-791, 819, 827-835, 840-842, 845, 847, 850, 852-853, 857, 859, 861, 866-872, 877-882, 884-887, 889-890, 893-894, 901, 923-931, 936-939, 975, 977, 981-986, 1019, 1023-1032, 1034, 1036-1041, 1083-1087, 1089, 1101, 1104-1105, 1107, 1109-1112, 1118-1123, 1131-1134, 1136, 1138-1139, 1140-1144, 1151-1152, 1161-1163, 1187-1192, 1194-1195, 1197, 1199-1201, 1204, 1207, 1209, 1214-1216, 1218, 1220-1223, 1239-1241, 1244, 1247, 1257-1259, 1262-1270, 1273-1275, 1277-1278, 1314-1315, or 1343. In some aspects, the antisense oligonucleotide comprises the nucleobase sequence of any one of SEQ ID NOs: 81-84, 86-87, 99-101, 106, 113-114, 122-126, 129-131, 137-138, 140, 144, 146-159, 172, 188-191, 211, 215-217, 219, 223-226, 229, 232-239, 242-249, 270-271, 274-279, 286-293, 295-298, 310-320, 322-328, 332-335, 337, 345, 384-388, 397-402, 405-421, 458, 473-474, 476-478, 482-487, 490-491, 493-494, 497-501, 522-526, 528-530, 542, 545-549, 551-560, 563-565, 585-586, 596-610, 613, 619-622, 631-634, 636-637, 639-643, 645-646, 649-651, 655, 699-709, 714-715, 729-731, 733-741, 744, 749, 752-754, 757, 765-766, 768-769, 788-791, 819, 827-835, 840-842, 845, 847, 850, 852-853, 857, 859, 861, 866-872, 877-882, 884-887, 889-890, 893-894, 901, 923-931, 936-939, 975, 977, 981-986, 1019, 1023-1032, 1034, 1036-1041, 1083-1087, 1089, 1101, 1104-1105, 1107, 1109-1112, 1118-1123, 1131-1134, 1136, 1138-1144, 1151-1152, 1161-1163, 1187-1191, 1194-1195, 1197, 1199-1201, 1204, 1207, 1209, 1214-1216, 1218, 1220-1223, 1239-1241, 1244, 1247, 1257-1259, 1262-1270, 1273-1275, 1277-1278, 1314-1315, or 1343. In some aspects, the antisense oligonucleotide comprises the nucleobase sequence of any one of SEQ ID NOs: 81-87, 99-101, 106, 113-114, 122-126, 129-131, 137-138, 140, 144, 146, 147, 148-151, 153-159, 172, 188-191, 211215-217, 219, 223-226, 229, 232-239, 242-245, 248-249, 270-271274-276, 278-279, 286-293, 295-298, 310-320, 322-338, 332-335, 337, 345, 384-386, 387-388, 397-402, 405-413, 415-421, 458, 473-474, 476-478, 482-487, 490-491, 493-494, 497-501, 522-526, 528-530, 542, 545-549, 551-560, 563-565, 585-586, 596-598, 600-610, 613, 619-622, 631-634, 636-637, 639-643, 645-646, 649-651, 655, 699, 701-709, 714-715, 729-731, 733-741, 744, 749, 752-754, 757, 765-766, 768-769, 788, 790-791, 819, 827-835, 840-842, 845, 847, 850, 852-853, 857, 859, 861, 866-872, 877-882, 884-887, 889-890, 893-894, 901, 923-931, 936-939, 975, 977, 981-986, 1019, 1023-1032, 1034, 1036-1041, 1083-1087, 1089, 1101, 1104-1105, 1107, 1109-1112, 1118-1123, 1131-1134, 1136, 1138-1144, 1151-1152, 1161-1163, 1187-1191, 1194-1195, 1197, 1199, 1200-1201, 1204, 1207, 1209, 1214-1216, 1218, 1220-1223, 1239-1241, 1244, 1247, 1257-1259, 1262-1270, 1273-1275, 1277-1278, 1314-1315, or 1343. In some aspects, the antisense oligonucleotide comprises the nucleobase sequence of any one of SEQ ID NOs: 122, 123, 125-126, 129-130, 131, 137, 146-147, 153-156, 158, 188-191, 211, 216, 223, 226, 235, 237, 245, 248, 270-271, 276, 278-279, 286, 289-293, 297-298, 310, 312-320, 323-328, 332, 334-335, 337, 385-386, 397-402, 407, 410-412, 415-417, 419-420, 476, 478, 482-487, 490-491, 493-494, 497-501, 522-523, 525-526, 528-530, 546-548, 557, 563-565, 586, 603, 605-610, 613, 619-622, 631-632, 634, 639-641, 645-646, 650-651, 655, 699, 701, 704-709, 714, 729-731, 733-734, 736-740, 744, 749, 752-754, 757, 765-766, 768-769, 788, 790-791, 819, 827-835, 840-842, 847, 850, 859, 861, 866-872, 877-882, 884-887, 889-890, 893-894, 901, 928-931, 936-939, 977, 981-986, 1019, 1024-1026, 1034, 1036-1041, 1083-1085, 1087, 1111, 1132-1134, 1136, 1138-1140, 1142, 1161-1163, 1188-1190, 1194-1195, 1207, 1218, 1241, 1244, 1247, 1257-1259, 1262-1269, 1277-1278, or 1314-1315. In some aspects, the antisense oligonucleotide comprises the nucleobase sequence of any one of SEQ ID NOs: 291-293, 313, 316-317, 325-326, 334-335, 415, 483, 485-486, 499-500, 523, 525, 564, 607, 622, 704-705, 707-709, 739, 752, 768-769, 788, 827, 861, 871-872, 877-879, 882, 885, 886, 901, 986, 1038, 1263, or 1265-1267. In some aspects, the antisense oligonucleotide comprises the nucleobase sequence of any one of SEQ ID NOs: 117, 215-226, 229-232, 287-293, 384-385, 387-388, 458, 484, 596-610, 850, 936-938, 981-986, 1083-1086, 1109-1112, or 1121-1123.

[0018] In some aspects, the nucleobase sequence of the antisense oligonucleotide consists of any one of SEQ ID NOs: 6-1393. In some aspects, the antisense oligonucleotide consists of the nucleobase sequence of any one of SEQ ID NOs: 81-87, 90, 99-101, 106-107, 111, 113-114, 117, 122-126, 129-131, 137-138, 140, 144, 146-160, 172, 188-191, 211, 215-220, 22-226, 229, 231-239, 242-249, 270-271, 274-279, 286-293, 295-297, 298, 310-320, 322-328, 332-335, 337, 345, 383-388, 397-402, 405-413, 415-421, 458, 473-474, 476-478, 482-487, 490-491, 493-494, 497-501, 522-526, 528-530, 542, 545-549, 551-560, 563-565, 585-586, 596-598, 600-610, 613, 619-622, 631-634, 636-637, 639-643, 645-646, 649-651, 655, 699, 701-709, 714-715, 729-731, 733-741, 744, 749, 752-754, 757, 765-766, 768-769, 788, 790-791, 819, 827-835, 840-842, 845, 847, 850, 852-853, 857, 859, 861, 866-872, 877-882, 884-887, 889-890, 893-894, 901, 923-931, 936-939, 975, 977, 981-986, 1019, 1023-1032, 1034, 1036-1041, 1083-1087, 1089, 1101, 1104-1105, 1107, 1109-1112, 118-1123, 1131-1134, 1136, 1138-1144, 1151-1152, 1161-1163, 1187-1192, 1194-1195, 1197, 1199-1201, 1204, 1207, 1209, 1214-1216, 1218, 1220-1222, 1223, 1239-1241, 1244, 1247, 1257-1259, 1262-1270, 1273-1275, 1277-1278, 1314-1315, or 1343. In some aspects, the antisense oligonucleotide consists of the nucleobase sequence of any one of SEQ ID NOs: 81-84, 86-87, 99-101, 106, 113-114, 122-126, 129-131, 137-138, 140, 144, 146-159, 172, 188-191, 211, 215-217, 219, 223-226, 229, 232-239, 242-249, 270-271, 274-279, 286-293, 295-298, 310-320, 322-328, 332-335, 337, 345, 384-388, 397-402, 405-413, 415-421, 458, 473-474, 476-478, 482-487, 490-491, 493-494, 497-501, 522-526, 528-530, 542, 545-549, 551-560, 563-565, 585-586, 596-598, 600-610, 613, 619-622, 631-634, 636-637, 639-643, 645-646, 649-651, 655, 699, 701-709, 714-715, 729-731, 733-741, 744, 749, 752-754, 757, 765-766, 768-769, 788, 790-791, 819, 827-835, 840-842, 845, 847, 850, 852-853, 857, 859, 861, 866-872, 877-882, 884-887, 889-890, 893-894, 901, 923-931, 936-939, 975, 977, 981-986, 1019, 1023-1032, 1034, 1036-1041, 1083-1087, 1089, 1101, 1104-1105, 1107, 1109-1112, 1118-1123, 1131-1134, 1136, 1138-1144, 1151-1152, 1161-1163, 1187-1191, 1194-1195, 1197, 1199-1201, 1204, 1207, 1209, 1214-1216, 1218, 1220-1223, 1239-1241, 1244, 1247, 1257-1259, 1262-1270, 1273-1275, 1277-1278, 1314-1315, or 1343. In some aspects, the antisense oligonucleotide consists of the nucleobase sequence of any one of SEQ ID NOs: 81-84, 86-87, 99-101, 106, 113-114, 122-126, 129-131, 137-138, 140, 144, 146-151, 153-159, 172, 188-191, 211, 215-217, 219223-226, 229, 232-239, 242-245, 248-249, 270-271, 274-276, 278-279, 286-293, 295-298, 310-320, 322-328, 332-335, 337, 345, 384-388, 397-402, 405-413, 415-421, 458, 473-474, 476-478, 482-487, 490-491, 493-494, 497-501, 522-525, 526, 528-530, 542, 545-549, 551-560, 563-565, 585-586, 596-598, 600-610, 613, 619-622, 631-634, 636-637, 639-643, 645-646, 649-651, 655, 699, 701-709, 714-715, 729-731, 733-741, 744, 749, 752-754, 757, 765-766, 768-769, 788, 790-791, 819, 827-835, 840-842, 845, 847, 850, 852-853, 857, 859, 861, 866-872, 877-882, 884-887, 889-890, 893-894, 901, 923-931, 936-939, 975, 977, 981-986, 1019, 1023-1032, 1034, 1036-1041, 1083-1087, 1089, 1101, 1104-1105, 1107, 1109-1112, 1118-1123, 1131-1134, 1136, 1138-1144, 1151-1152, 1161-1163, 1187-1191, 1194-1195, 1197, 1199-1201, 1204, 1207, 1209, 1214-1216, 1218, 1220-1223, 1239-1241, 1244, 1247, 1257-1259, 1262-1270, 1273-1275, 1277-1278, 1314-1315, or 1343. In some aspects, the antisense oligonucleotide consists of the nucleobase sequence of any one of SEQ ID NOs: 122-123, 125-126, 129-131, 137, 146-147, 153-156, 158, 188-191, 211, 216, 223, 226, 235, 237, 245, 248, 270-271, 276, 278-279, 286, 289-293, 297-298, 310, 312-320, 323-328, 332, 334-335, 337, 385-386, 397-402, 407, 410-412, 415-417, 419-420, 476, 478, 482-487, 490-491, 493-494, 497-501, 522-523, 525-526, 528-530, 546-548, 557, 563-565, 586, 603, 605-610, 613, 619-622, 631-632, 634, 639-641, 645-646, 650-651, 655, 699, 701, 704-709, 714, 729-731, 733-734, 736-740, 744, 749, 752-754, 757, 765-766, 768-769, 788, 790-791, 819, 827-835, 840-842, 847, 850, 859, 861, 866-867, 868-872, 877-882, 884-887, 889-890, 893-894, 901, 928-931, 936-939, 977, 981-986, 1019, 1024-1026, 1034, 1036-1041, 1083-1085, 1087, 1111, 1132-1134, 1136, 1138-1140, 1142, 1161-1163, 1188-1190, 1194-1195, 1207, 1218, 1241, 1244, 1247, 1257-1259, 1262-1269, 1277-1278, or 1314-1315. In some aspects, the antisense oligonucleotide consists of the nucleobase sequence of any one of SEQ ID NOs: 291-293, 313, 316-317, 325-326, 334-335, 415, 483, 485-486, 499-500, 523, 525, 564, 607, 622, 704-705, 707-709, 739, 752, 768-769, 788, 827, 861, 871-872, 877-879, 882, 885, 886, 901, 986, 1038, 1263, or 1265-1267. In some aspects, the antisense oligonucleotide consists of the nucleobase sequence of any one of SEQ ID NOs: 117, 215-226, 229-232, 287-293, 384-385, 387-388, 458-484, 596-610, 850, 936-938, 981-986, 1083-1086, 1109-1112 or 1121-1123.

[0019] In some aspects, the antisense oligonucleotide exhibits at least 50% mRNA inhibition at a 20 nM oligonucleotide concentration when determined using a cell assay when compared with a control cell. In some aspects, the antisense oligonucleotide exhibits at least 60% mRNA inhibition at a 20 nM antisense oligonucleotide concentration when determined using a cell assay when compared with a control cell. In some aspects, the antisense oligonucleotide exhibits at least 70% mRNA inhibition at a 20 nM antisense oligonucleotide concentration when determined using a cell assay when compared with a control cell. In some aspects, the antisense oligonucleotide exhibits at least 85% mRNA inhibition at a 20 nM antisense oligonucleotide concentration when determined using a cell assay when compared with a control cell. In some aspects, the antisense oligonucleotide exhibits at least 50% mRNA inhibition at a 20 nM antisense oligonucleotide concentration when determined using a cell assay when compared with a control cell. In some aspects, the antisense oligonucleotide exhibits at least 60% mRNA inhibition at a 20 nM antisense oligonucleotide concentration when determined using a cell assay when compared with a control cell. In some aspects, the antisense oligonucleotide exhibits at least 70% mRNA inhibition at a 20 nM antisense oligonucleotide concentration when determined using a cell assay when compared with a control cell. In some aspects, the antisense oligonucleotide exhibits at least 85% mRNA inhibition at a 20 nM antisense oligonucleotide concentration when determined using a cell assay when compared with a control cell. The cell assay can comprise transfecting a mammalian cell, such as HEK293, NIH3T3, or HeLa, with oligonucleotides using Lipofectamine 2000 (Invitrogen) and measuring mRNA levels compared to a mammalian cell transfected with a mock oligonucleotide.

[0020] In some aspects, he antisense oligonucleotide comprises at least one alternative internucleoside linkage. In some aspects, the at least one alternative internucleoside linkage is a phosphorothioate internucleoside linkage. In some aspects, the at least one alternative internucleoside linkage is a 2′-alkoxy internucleoside linkage. In some aspects, the at least one alternative internucleoside linkage is an alkyl phosphate internucleoside linkage.

[0021] In some aspects, the antisense oligonucleotide comprises at least one alternative nucleobase. In some aspects, the alternative nucleobase is 5′-methylcytosine, pseudouridine, or 5-methoxyuridine.

[0022] In some aspects, the antisense oligonucleotide comprises at least one alternative sugar moiety. In some aspects, the alternative sugar moiety is 2′-OMe or a bicyclic nucleic acid.

[0023] In some aspects, the antisense oligonucleotide further comprises a ligand conjugated to the 5′ end or the 3′ end of the antisense oligonucleotide through a monovalent or branched bivalent or trivalent linker.

[0024] In some aspects, the antisense oligonucleotide comprises a region complementary to at least 17 contiguous nucleotides of a MLH1 gene. In some aspects, the antisense oligonucleotide comprises a region complementary to at least 19 contiguous nucleotides of a MLH1 gene. In some aspects, the antisense oligonucleotide comprises a region complementary to 19 to 23 contiguous nucleotides of a MLH1 gene. In some aspects, the antisense oligonucleotide comprises a region complementary to 19 contiguous nucleotides of a MLH1 gene. In some aspects, the antisense oligonucleotide comprises a region complementary to 20 contiguous nucleotides of a MLH1 gene. In some aspects, the antisense oligonucleotide is from about 15 to 25 nucleosides in length. In some aspects, the antisense oligonucleotide is 20 nucleosides in length.

### Pharmaceutical Compositions and Methods of Treatment Using Antisense Oligonucleotides

[0025] In some aspects, the application is directed to a pharmaceutical composition comprising one or more of the antisense oligonucleotides described herein and a pharmaceutically acceptable carrier or excipient. In some aspects, the application is directed to a composition comprising one or more of the antisense oligonucleotides described herein and a lipid nanoparticle, a polyplex nanoparticle, a lipoplex nanoparticle, or a liposome.

[0026] In some aspects, the application is directed to a method of inhibiting transcription of MLH1 in a cell, the method comprising contacting the cell with: one or more of the oligonucleotides described herein; a pharmaceutical composition of one or more of the oligonucleotides described herein and a pharmaceutically acceptable carrier or excipient; or the composition of one or more of the oligonucleotides described herein and a lipid nanoparticle, a polyplex nanoparticle, a lipoplex nanoparticle or a liposome; for a time sufficient to obtain degradation of an mRNA transcript of a MLH1 gene, inhibiting expression of the MLH1 gene in the cell.

[0027] In some aspects, the application is directed to a method of treating, preventing, or delaying the progression a trinucleotide repeat expansion disorder in a subject in need thereof, the method comprising administering to the subject: one or more of the oligonucleotides described herein; the pharmaceutical composition of one or more oligonucleotides described herein and a pharmaceutically acceptable carrier or excipient; or the composition of one or more of the oligonucleotides described herein and a lipid nanoparticle, polyplex nanoparticle, a lipoplex nanoparticle, or a liposome.

[0028] In some aspects, the application is directed to a method of reducing the level and/or activity of MLH1 in a cell of a subject identified as having a trinucleotide repeat expansion disorder, the method comprising contacting the cell with: one or more of the oligonucleotides described herein; the pharmaceutical composition of one or more oligonucleotides described herein and a pharmaceutically acceptable carrier or excipient; or the composition of one or more of the oligonucleotides described herein and a lipid nanoparticle, polyplex nanoparticle, a lipoplex nanoparticle, or a liposome.

[0029] In some aspects, the application is directed to a method for inhibiting expression of an MLH1 gene in a cell comprising contacting the cell with: one or more of the oligonucleotides described herein; the pharmaceutical composition of one or more oligonucleotides described herein and a pharmaceutically acceptable carrier or excipient; or the composition of one or more of the oligonucleotides described herein and a lipid nanoparticle, polyplex nanoparticle, a lipoplex nanoparticle, or a liposome, and maintaining the cell for a time sufficient to obtain degradation of a mRNA transcript of an MLH1 gene, thereby inhibiting expression of the MLH1 gene in the cell.

[0030] In some aspects, the application is directed to a method of decreasing trinucleotide repeat expansion in a cell, the method comprising contacting the cell with: one or more of the oligonucleotides described herein; the pharmaceutical composition of one or more oligonucleotides described herein and a pharmaceutically acceptable carrier or excipient; or the composition of one or more of the oligonucleotides described herein and a lipid nanoparticle, polyplex nanoparticle, a lipoplex nanoparticle, or a liposome.

[0031] In some aspects, a method of treating, preventing, or delaying the progression a disorder in a subject in need thereof wherein the subject is suffering from trinucleotide repeat expansion disorder, comprising administering to said subject the oligonucleotide described herein. In some aspects, the method further comprises administering a second therapeutic agent. In some aspects, the second therapeutic agent is a second oligonucleotide that hybridizes to an mRNA encoding the Huntingtin gene.

[0032] In some aspects, a method of preventing or delaying the progression of a trinucleotide repeat expansion disorder in a subject, the method comprising administering to the subject an oligonucleotide in an amount effective to delay progression of a trinucleotide repeat expansion disorder of the subject.

[0033] In some aspects, the cell is in a subject. In some aspects, the subject is a human. In some aspects, the cell is a cell of the central nervous system or a muscle cell.

In some aspects, the subject is identified as having a trinucleotide repeat expansion disorder. In some aspects, the trinucleotide repeat expansion disorder is a polyglutamine disease. In some aspects the polyglutamine disease is selected from the group consisting of dentatorubropallidoluysian atrophy, Huntington's disease, spinal and bulbar muscular atrophy, spinocerebellar ataxia type 1, spinocerebellar ataxia type 2, spinocerebellar ataxia type 3, spinocerebellar ataxia type 6, spinocerebellar ataxia type 7, spinocerebellar ataxia type 17, or Huntington's disease-like 2. In some aspects, the trinucleotide repeat expansion disorder is Huntington's disease.

[0034] In some aspects, the trinucleotide repeat expansion disorder is a non-polyglutamine disease. IN some aspects, the non-polyglutamine disease is selected from the group consisting of fragile X syndrome, fragile X-associated tremor/ataxia syndrome, fragile XE mental retardation, Friedreich's ataxia, myotonic dystrophy type 1, spinocerebellar ataxia type 8, spinocerebellar ataxia type 12, oculopharyngeal muscular dystrophy, Fragile X-associated premature ovarian failure, FRA2A syndrome, FRA7A syndrome, or early infantile epileptic encephalopathy. In some aspects, the trinucleotide repeat expansion disorder is Friedreich's ataxia. In some aspects, the trinucleotide repeat expansion disorder is myotonic dystrophy type 1.

[0035] In some aspects, the antisense oligonucleotide, pharmaceutical composition, or composition is administered intrathecally. In some aspects, the antisense oligonucleotide, pharmaceutical composition, or composition is administered intraventricularly. In some aspects, the antisense oligonucleotide, pharmaceutical composition, or composition is administered intramuscularly.

[0036] In some aspects, the progression of the trinucleotide repeat expansion disorder is delayed by at least 120 days, for example, at least 6 months, at least 12 months, at least 2 years, at least 3 years, at least 4 years, at least 5 years, at least 10 years or more, when compared with the predicted progression.

dsRNAs

[0037] In some aspects, a double-stranded ribonucleic acid (dsRNA), wherein the dsRNA comprises a sense strand and an antisense strand, wherein the antisense strand is complementary to at least 15 contiguous nucleobases of an MLH1 gene, and wherein the dsRNA comprises a duplex structure of between 15 and 30 linked nucleosides in length is provided herein.

[0038] In some aspects, a dsRNA for reducing expression of MLH1 in a cell, wherein the dsRNA comprises a sense strand and an antisense strand, wherein the antisense strand is complementary to at least 15 contiguous nucleobases of an MLH1 gene, and wherein the dsRNA comprises a duplex structure of between 15 and 30 linked nucleosides in length is provided herein.

[0039] In some aspects, the dsRNA comprises a duplex structure of between 19 and 23 linked nucleosides in length.

[0040] In some aspects, the dsRNA further comprises a loop region joining the sense strand and antisense strand, wherein the loop region is characterized by a lack of base pairing between nucleobases within the loop region.

[0041] In some aspects, the region the sense or antisense strand is complementary to is at least 15 contiguous nucleotides of an MLH1 gene corresponding to reference mRNA NM_000249.3 at one or more of positions 153-176, 267-388, 417-545, 792-995, 1639-1727, 1849-1900, 2105-2207, 2337-2387, 2426-2479 and 2508-2600 of the MLH1 gene. IN some aspects, the region the sense or antisense strand is complementary to is at least 15 contiguous nucleotides of an MLH1 gene corresponding to reference mRNA NM_000249.3 at one or more of positions 326-388, 459-511, 805-878, 903-926, 1639-1720, and 2141-2192 of the MLH1 gene. In some aspects, the region the sense or antisense strand is complementary to is at least 15 contiguous nucleotides of an MLH1 gene corresponding to reference mRNA NM_000249.3 at one or more of positions 267-388, 417-545, 805-878, 903-995, 1639-1727, 1849-1900, 2141-2207, 2337-2387, and 2426-2479 of the MLH1 gene. In some aspects, the region the sense or antisense strand is complementary to is at least 15 contiguous nucleotides of an MLH1 gene corresponding to reference mRNA NM_000249.3 at one or more of positions 153-176, 267-388, 417-545, 792-995, 1639-1727, 1849-1900, 2105-2207, 2337-2387, and 2426-2479 of the MLH1 gene. In some aspects, the region the sense or antisense strand is complementary to is at least 15 contiguous nucleotides of an MLH1 gene corresponding to reference mRNA NM_000249.3 at one or more of positions 332-355, 459-545, 836-859, 1849-1900, 2141-2164, and 2426-2449 of the MLH1 gene. In some aspects, the region the sense or antisense strand is complementary to is at least 15 contiguous nucleotides of an MLH1 gene corresponding to reference mRNA NM_000249.3 at one or more of positions 267-388, 417-545, 805-995, 1639-1722, 1849-1900, 2105-2207, 2337-2387, 2426-2479, and 2508-2600 of the MLH1 gene.

[0042] In some aspects, the antisense strand comprises an antisense nucleobase sequence selected from a list in Table 4, wherein the 5′ nucleotide represented by U of the antisense oligonucleotide is any nucleotide (e.g., U, A, G, C, T), and the sense strand comprises a sense nucleobase sequence complementary to the antisense nucleobase sequence. In some aspects, the antisense nucleobase sequence consists of an antisense strand in Table 4, wherein the 5′ nucleotide represented by U of the antisense oligonucleotide is any nucleotide (e.g., U, A, G, C, T), and the sense nucleobase sequence consists of a sequence complementary to the antisense nucleobase sequence. In some aspects, the sense strand comprises a sense nucleobase sequence selected from a list in Table 4, and the antisense strand comprises an antisense nucleobase sequence complementary to the sense nucleobase sequence. In some aspects, the sense nucleobase sequence consists of a sense sequence in Table 4, and the antisense nucleobase sequence consists of a sequence complementary to the sense nucleobase sequence.

[0043] In some aspects, the sense strand comprises a sense nucleobase sequence selected from any one of the lists in Tables 5-11, and the antisense strand comprises an antisense nucleobase sequence complementary to the sense nucleobase sequence. In some aspects, the sense nucleobase sequence consists of a sense sequence in any one of Tables 5-11, and the antisense nucleobase sequence consists of a sequence complementary to the sense nucleobase sequence.

[0044] In some aspects, the antisense strand comprises an antisense nucleobase sequence selected from a list in Table 13, wherein the 5′ nucleotide represented by U of the antisense oligonucleotide is any nucleotide (e.g., U, A, G, C, T), and the sense strand comprises a sense nucleobase sequence complementary to the antisense nucleobase sequence. In some aspects, the antisense nucleobase sequence consists of an antisense sequence in Table 13, wherein the 5′ nucleotide represented by U of the antisense oligonucleotide is any nucleotide (e.g., U, A, G, C, T), and the sense nucleobase sequence consists of a sequence complementary to the antisense nucleobase sequence. In some aspects, the sense strand comprises a sense nucleobase sequence selected from a list in Table 13, and the antisense strand comprises an antisense nucleobase sequence complementary to the sense nucleobase sequence. In some aspects, the sense nucleobase sequence consists of a sense sequence in Table 13, and the antisense nucleobase sequence consists of a sequence complementary to the sense nucleobase sequence.

[0045] In some aspects, the dsRNA comprises at least one alternative nucleobase, at least one alternative internucleoside linkage, and/or at least one alternative sugar moiety. In some aspects, the at least one alternative internucleoside linkage is a phosphorothioate internucleoside linkage. In some aspects, the at least one alternative internucleoside linkage is a 2′-alkoxy internucleoside linkage. In some aspects, the at least one alternative internucleoside linkage is an alkyl phosphate internucleoside linkage.

[0046] In some aspects, the at least one alternative nucleobase is 5′-methylcytosine, pseudouridine, or 5-methoxyuridine. In some aspects, the alternative sugar moiety is 2′-OMe or a bicyclic nucleic acid. In some aspects, the dsRNA comprises at least one 2′-OMe sugar moiety and at least one phosphorothioate internucleoside linkage.

[0047] In some aspects, the dsRNA further comprises a ligand conjugated to the 3′ end of the sense strand through a monovalent or branched bivalent or trivalent linker.

[0048] In some aspects, the sense strand comprises a nucleobase sequence of any one of SEQ ID NOs: 1486, 1492, 1494, 1496, 1536, 1544, 1546, 1560, 1562, 1564, 1584, 1598, 1604, 1608, 1622, 1624, 1630, 1660, 1710, 1720, 1722, 1726, 1728, 1732, 1734, 1736, 1748, 1752, 1756, 1758, 1762, 1764, 1772, 1954, 1960, 1966, 1972, 1974, 1976, 1998, 2008, 2012, 2024, 2034, 2038, 2052, 2054, 2080, 2086, 2114, 2116, 2120, 2122, 2158, 2162, 2176, 2178, 2570, 2588, 2598, 2604, 2608, 2612, 2616, 2618, 2622, 2628, 2720, 2744, 2746, 2748, 2752, 2894, 2898, 2902, 2906, 2916, 2922, 2924, 2928, 2936, 2938, 2940, 2944, 2948, 2966, 3064, 3066, 3084, 3088, 3120, 3122, 3124, 3130, 3134, 3136, 3148, 3164, 3210, 3212, 3216, 3248, 3272, 3274, 3276, 3278, and 3288. In some aspects, the sense strand comprises a nucleobase sequence of any one of SEQ ID NOs: 1584, 1598, 1604, 1608, 1622, 1624, 1630, 1710, 1720, 1722, 1726, 1728, 1732, 1734, 1736, 1748, 1752, 1756, 1758, 1762, 1954, 1960, 1966, 1972, 1974, 1976, 1998, 2008, 2012, 2024, 2034, 2038, 2052, 2054, 2080, 2086, 2570, 2588, 2598, 2604, 2608, 2612, 2616, 2618, 2622, 2628, 2916, 2922, 2924, 2928, 2936, 2938, 2940, 2944, 2948, and 2966. In some aspects, the sense strand comprises a nucleobase sequence of any one of SEQ ID NOs: 1536, 1544, 1546, 1560, 1562, 1564, 1584, 1598, 1604, 1608, 1622, 1624, 1630, 1660, 1710, 1720, 1722, 1726, 1728, 1732, 1734, 1736, 1748, 1752, 1756, 1758, 1762, 1764, 1772, 1954, 1960, 1966, 1972, 1974, 1976, 1998, 2008, 2012, 2024, 2034, 2038, 2052, 2054, 2080, 2086, 2114, 2116, 2120, 2122, 2158, 2162, 2176, 2178, 2570, 2588, 2598, 2604, 2608, 2612, 2616, 2618, 2622, 2628, 2720, 2744, 2746, 2748, 2752, 2916, 2922, 2924, 2928, 2936, 2938, 2940, 2944, 2948, 2966, 3064, 3066, 3084, 3088, 3120, 3122, 3124, 3130, 3134, 3136, 3148, and 3164. In some aspects, the sense strand comprises a nucleobase sequence of any one of SEQ ID NOs: 1486, 1492, 1494, 1496, 1536, 1544, 1546, 1560, 1562, 1564, 1584, 1598, 1604, 1608, 1622, 1624, 1630, 1660, 1710, 1720, 1722, 1726, 1728, 1732, 1734, 1736, 1748, 1752, 1756, 1758, 1762, 1764, 1772, 1954, 1960, 1966, 1972, 1974, 1976, 1998, 2008, 2012, 2024, 2034, 2038, 2052, 2054, 2080, 2086, 2114, 2116, 2120, 2122, 2158, 2162, 2176, 2178, 2570, 2588, 2598, 2604, 2608, 2612, 2616, 2618, 2622, 2628, 2720, 2744, 2746, 2748, 2752, 2894, 2898, 2902, 2906, 2916, 2922, 2924, 2928, 2936, 2938, 2940, 2944, 2948, 2966, 3064, 3066, 3084, 3088, 3120, 3122, 3124, 3130, 3134, 3136, 3148, and 3164. In some aspects, the sense strand comprises a nucleobase sequence of any one of SEQ ID NOs: 1584, 1598, 1604, 1608, 1710, 1720, 1722, 1726, 1728, 1732, 1734, 1736, 1748, 1752, 1756, 1758, 1762, 1764, 1772, 1998, 2008, 2012, 2024, 2720, 2744, 2746, 2748, 2752, 2916, 2922, 2924, 2928, 2936, 2938, 2940, 2944, 3120, 3122, 3124, 3130, 3134, 3136, and 3148. In some aspects, the sense strand comprises a nucleobase sequence of any one of SEQ ID NOs: 1536, 1544, 1546, 1560, 1562, 1564, 1584, 1598, 1604, 1608, 1622, 1624, 1630, 1660, 1710, 1720, 1722, 1726, 1728, 1732, 1734, 1736, 1748, 1752, 1756, 1758, 1762, 1764, 1772, 1954, 1960, 1966, 1972, 1974, 1976, 1998, 2008, 2012, 2024, 2034, 2038, 2052, 2054, 2080, 2086, 2114, 2116, 2120, 2122, 2158, 2162, 2176, 2178, 2570, 2588, 2598, 2604, 2608, 2612, 2616, 2618, 2622, 2628, 2720, 2744, 2746, 2748, 2752, 2894, 2898, 2902, 2906, 2916, 2922, 2924, 2928, 2936, 2938, 2940, 2944, 2948, 2966, 3064, 3066, 3084, 3088, 3120, 3122, 3124, 3130, 3134, 3136, 3148, 3164, 3210, 3212, 3216, 3248, 3272, 3274, 3276, 3278, and 3288.

[0049] In some aspects, the antisense strand comprises a nucleobase sequence of any one of SEQ ID NOs: 1487, 1493, 1495, 1497, 1537, 1545, 1547, 1561, 1563, 1565, 1585, 1599, 1605, 1609, 1623, 1625, 1631, 1661, 1711, 1721, 1723, 1727, 1729, 1733, 1735, 1737, 1749, 1753, 1757, 1759, 1763, 1765, 1773, 1955, 1961, 1967, 1973, 1975, 1977, 1999, 2009, 2013, 2025, 2035, 2039, 2053, 2055, 2081, 2087, 2115, 2117, 2121, 2123, 2159, 2163, 2177, 2179, 2571, 2589, 2599, 2605, 2609, 2613, 2617, 2619, 2623, 2629, 2721, 2745, 2747, 2749, 2753, 2895, 2899, 2903, 2907, 2917, 2923, 2925, 2929, 2937, 2939, 2941, 2945, 2949, 2967, 3065, 3067, 3085, 3089, 3121, 3123, 3125, 3131, 3135, 3137, 3149, 3165, 3211, 3213, 3217, 3249, 3273, 3275, 3277, 3279, and 3289, wherein the 5′ nucleotide represented by U of the antisense oligonucleotide is any nucleotide (e.g., U, A, G, C, T). In some aspects, the antisense strand comprises a nucleobase sequence of any one of SEQ ID NOs: 1585, 1599, 1605, 1609, 1623, 1625, 1631, 1711, 1721, 1723, 1727, 1729, 1733, 1735, 1737, 1749, 1753, 1757, 1759, 1763, 1955, 1961, 1967, 1973, 1975, 1977, 1999, 2009, 2013, 2025, 2035, 2039, 2053, 2055, 2081, 2087, 2571, 2589, 2599, 2605, 2609, 2613, 2617, 2619, 2623, 2629, 2917, 2923, 2925, 2929, 2937, 2939, 2941, 2945, 2949, and 2967, wherein the 5′ nucleotide represented by U of the antisense oligonucleotide is any nucleotide (e.g., U, A, G, C, T). In some aspects, the antisense strand comprises a nucleobase sequence of any one of SEQ ID NOs: 1537, 1545, 1547, 1561, 1563, 1565, 1585, 1599, 1605, 1609, 1623, 1625, 1631, 1661, 1711, 1721, 1723, 1727, 1729, 1733, 1735, 1737, 1749, 1753, 1757, 1759, 1763, 1765, 1773, 1955, 1961, 1967, 1973, 1975, 1977, 1999, 2009, 2013, 2025, 2035, 2039, 2053, 2055, 2081, 2087, 2115, 2117, 2121, 2123, 2159, 2163, 2177, 2179, 2571, 2589, 2599, 2605, 2609, 2613, 2617, 2619, 2623, 2629, 2721, 2745, 2747, 2749, 2753, 2917, 2923, 2925, 2929, 2937, 2939, 2941, 2945, 2949, 2967, 3065, 3067, 3085, 3089, 3121, 3123, 3125, 3131, 3135, 3137, 3149, and 3165, wherein the 5′ nucleotide represented by U of the antisense oligonucleotide is any nucleotide (e.g., U, A, G, C, T). In some aspects, the antisense strand comprises a nucleobase sequence of any one of SEQ ID NOs: 1487, 1493, 1495, 1497, 1537, 1545, 1547, 1561, 1563, 1565, 1585, 1599, 1605, 1609, 1623, 1625, 1631, 1661, 1711, 1721, 1723, 1727, 1729, 1733, 1735, 1737, 1749, 1753, 1757, 1759, 1763, 1765, 1773, 1955, 1961, 1967, 1973, 1975, 1977, 1999, 2009, 2013, 2025, 2035, 2039, 2053, 2055, 2081, 2087, 2115, 2117, 2121, 2123, 2159, 2163, 2177, 2179, 2571, 2589, 2599, 2605, 2609, 2613, 2617, 2619, 2623, 2629, 2721, 2745, 2747, 2749, 2753, 2895, 2899, 2903, 2907, 2917, 2923, 2925, 2929, 2937, 2939, 2941, 2945, 2949, 2967, 3065, 3067, 3085, 3089, 3121, 3123, 3125, 3131, 3135, 3137, 3149, and 3165, wherein the 5′ nucleotide represented by U of the antisense oligonucleotide is any nucleotide (e.g., U, A, G, C, T). In some aspects, the antisense strand comprises a nucleobase sequence of any one of SEQ ID NOs: 1585, 1599, 1605, 1609, 1711, 1721, 1723, 1727, 1729, 1733, 1735, 1737, 1749, 1753, 1757, 1759, 1763, 1765, 1773, 1999, 2009, 2013, 2025, 2721, 2745, 2747, 2749, 2753, 2917, 2923, 2925, 2929, 2937, 2939, 2941, 2945, 3121, 3123, 3125, 3131, 3135, 3137, and 3149, wherein the 5′ nucleotide represented by U of the antisense oligonucleotide is any nucleotide (e.g., U, A, G, C, T). In some aspects, the antisense strand comprises a nucleobase sequence of any one of SEQ ID NOs: 1537, 1545, 1547, 1561, 1563, 1565, 1585, 1599, 1605, 1609, 1623, 1625, 1631, 1661, 1711, 1721, 1723, 1727, 1729, 1733, 1735, 1737, 1749, 1753, 1757, 1759, 1763, 1765, 1773, 1955, 1961, 1967, 1973, 1975, 1977, 1999, 2009, 2013, 2025, 2035, 2039, 2053, 2055, 2081, 2087, 2115, 2117, 2121, 2123, 2159, 2163, 2177, 2179, 2571, 2589, 2599, 2605, 2609, 2613, 2617, 2619, 2623, 2629, 2721, 2745, 2747, 2749, 2753, 2895, 2899, 2903, 2907, 2917, 2923, 2925, 2929, 2937, 2939, 2941, 2945, 2949, 2967, 3065, 3067, 3085, 3089, 3121, 3123, 3125, 3131, 3135, 3137, 3149, 3165, 3211, 3213, 3217, 3249, 3273, 3275, 3277, 3279, and 3289, wherein the 5′ nucleotide represented by U of the antisense oligonucleotide is any nucleotide (e.g., U, A, G, C, T).

[0050] In some aspects, the sense strand consists of a nucleobase sequence of any one of SEQ ID NOs: 1486, 1492, 1494, 1496, 1536, 1544, 1546, 1560, 1562, 1564, 1584, 1598, 1604, 1608, 1622, 1624, 1630, 1660, 1710, 1720, 1722, 1726, 1728, 1732, 1734, 1736, 1748, 1752, 1756, 1758, 1762, 1764, 1772, 1954, 1960, 1966, 1972, 1974, 1976, 1998, 2008, 2012, 2024, 2034, 2038, 2052, 2054, 2080, 2086, 2114, 2116, 2120, 2122, 2158, 2162, 2176, 2178, 2570, 2588, 2598, 2604, 2608, 2612, 2616, 2618, 2622, 2628, 2720, 2744, 2746, 2748, 2752, 2894, 2898, 2902, 2906, 2916, 2922, 2924, 2928, 2936, 2938, 2940, 2944, 2948, 2966, 3064, 3066, 3084, 3088, 3120, 3122, 3124, 3130, 3134, 3136, 3148, 3164, 3210, 3212, 3216, 3248, 3272, 3274, 3276, 3278, and 3288. In some aspects, the sense strand consists of a nucleobase sequence of any one of SEQ ID NOs: 1584, 1598, 1604, 1608, 1622, 1624, 1630, 1710, 1720, 1722, 1726, 1728, 1732, 1734, 1736, 1748, 1752, 1756, 1758, 1762, 1954, 1960, 1966, 1972, 1974, 1976, 1998, 2008, 2012, 2024, 2034, 2038, 2052, 2054, 2080, 2086, 2570, 2588, 2598, 2604, 2608, 2612, 2616, 2618, 2622, 2628, 2916, 2922, 2924, 2928, 2936, 2938, 2940, 2944, 2948, and 2966. In some aspects, the sense strand consists of a nucleobase sequence of any one of SEQ ID NOs: 1536, 1544, 1546, 1560, 1562, 1564, 1584, 1598, 1604, 1608, 1622, 1624, 1630, 1660, 1710, 1720, 1722, 1726, 1728, 1732, 1734, 1736, 1748, 1752, 1756, 1758, 1762, 1764, 1772, 1954, 1960, 1966, 1972, 1974, 1976, 1998, 2008, 2012, 2024, 2034, 2038, 2052, 2054, 2080, 2086, 2114, 2116, 2120, 2122, 2158, 2162, 2176, 2178, 2570, 2588, 2598, 2604, 2608, 2612, 2616, 2618, 2622, 2628, 2720, 2744, 2746, 2748, 2752, 2916, 2922, 2924, 2928, 2936, 2938, 2940, 2944, 2948, 2966, 3064, 3066, 3084, 3088, 3120, 3122, 3124, 3130, 3134, 3136, 3148, and 3164. In some aspects, the sense strand consists of a nucleobase sequence of any one of SEQ ID NOs: 1486, 1492, 1494, 1496, 1536, 1544, 1546, 1560, 1562, 1564, 1584, 1598, 1604, 1608, 1622, 1624, 1630, 1660, 1710, 1720, 1722, 1726, 1728, 1732, 1734, 1736, 1748, 1752, 1756, 1758, 1762, 1764, 1772, 1954, 1960, 1966, 1972, 1974, 1976, 1998, 2008, 2012, 2024, 2034, 2038, 2052, 2054, 2080, 2086, 2114, 2116, 2120, 2122, 2158, 2162, 2176, 2178, 2570, 2588, 2598, 2604, 2608, 2612, 2616, 2618, 2622, 2628, 2720, 2744, 2746, 2748, 2752, 2894, 2898, 2902, 2906, 2916, 2922, 2924, 2928, 2936, 2938, 2940, 2944, 2948, 2966, 3064, 3066, 3084, 3088, 3120, 3122, 3124, 3130, 3134, 3136, 3148, and 3164. In some aspects, the sense strand consists of a nucleobase sequence of any one of SEQ ID NOs: 1584, 1598, 1604, 1608, 1710, 1720, 1722, 1726, 1728, 1732, 1734, 1736, 1748, 1752, 1756, 1758, 1762, 1764, 1772, 1998, 2008, 2012, 2024, 2720, 2744, 2746, 2748, 2752, 2916, 2922, 2924, 2928, 2936, 2938, 2940, 2944, 3120, 3122, 3124, 3130, 3134, 3136, and 3148. In some aspects, the sense strand consists of a nucleobase sequence of any one of SEQ ID NOs: 1536, 1544, 1546, 1560, 1562, 1564, 1584, 1598, 1604, 1608, 1622, 1624, 1630, 1660, 1710, 1720, 1722, 1726, 1728, 1732, 1734, 1736, 1748, 1752, 1756, 1758, 1762, 1764, 1772, 1954, 1960, 1966, 1972, 1974, 1976, 1998, 2008, 2012, 2024, 2034, 2038, 2052, 2054, 2080, 2086, 2114, 2116, 2120, 2122, 2158, 2162, 2176, 2178, 2570, 2588, 2598, 2604, 2608, 2612, 2616, 2618, 2622, 2628, 2720, 2744, 2746, 2748, 2752, 2894, 2898, 2902, 2906, 2916, 2922, 2924, 2928, 2936, 2938, 2940, 2944, 2948, 2966, 3064, 3066, 3084, 3088, 3120, 3122, 3124, 3130, 3134, 3136, 3148, 3164, 3210, 3212, 3216, 3248, 3272, 3274, 3276, 3278, and 3288.

[0051] In some aspects, the antisense strand consists of a nucleobase sequence of any one of SEQ ID NOs: 1487, 1493, 1495, 1497, 1537, 1545, 1547, 1561, 1563, 1565, 1585, 1599, 1605, 1609, 1623, 1625, 1631, 1661, 1711, 1721, 1723, 1727, 1729, 1733, 1735, 1737, 1749, 1753, 1757, 1759, 1763, 1765, 1773, 1955, 1961, 1967, 1973, 1975, 1977, 1999, 2009, 2013, 2025, 2035, 2039, 2053, 2055, 2081, 2087, 2115, 2117, 2121, 2123, 2159, 2163, 2177, 2179, 2571, 2589, 2599, 2605, 2609, 2613, 2617, 2619, 2623, 2629, 2721, 2745, 2747, 2749, 2753, 2895, 2899, 2903, 2907, 2917, 2923, 2925, 2929, 2937, 2939, 2941, 2945, 2949, 2967, 3065, 3067, 3085, 3089, 3121, 3123, 3125, 3131, 3135, 3137, 3149, 3165, 3211, 3213, 3217, 3249, 3273, 3275, 3277, 3279, and 3289, wherein the 5′ nucleotide represented by U of the antisense oligonucleotide is any nucleotide (e.g., U, A, G, C, T). In some aspects, the antisense strand consists of a nucleobase sequence of any one of SEQ ID NOs: 1585, 1599, 1605, 1609, 1623, 1625, 1631, 1711, 1721, 1723, 1727, 1729, 1733, 1735, 1737, 1749, 1753, 1757, 1759, 1763, 1955, 1961, 1967, 1973, 1975, 1977, 1999, 2009, 2013, 2025, 2035, 2039, 2053, 2055, 2081, 2087, 2571, 2589, 2599, 2605, 2609, 2613, 2617, 2619, 2623, 2629, 2917, 2923, 2925, 2929, 2937, 2939, 2941, 2945, 2949, and 2967, wherein the 5′ nucleotide represented by U of the antisense oligonucleotide is any nucleotide (e.g., U, A, G, C, T). In some aspects, the antisense strand consists of a nucleobase sequence of any one of SEQ ID NOs: 1537, 1545, 1547, 1561, 1563, 1565, 1585, 1599, 1605, 1609, 1623, 1625, 1631, 1661, 1711, 1721, 1723, 1727, 1729, 1733, 1735, 1737, 1749, 1753, 1757, 1759, 1763, 1765, 1773, 1955, 1961, 1967, 1973, 1975, 1977, 1999, 2009, 2013, 2025, 2035, 2039, 2053, 2055, 2081, 2087, 2115, 2117, 2121, 2123, 2159, 2163, 2177, 2179, 2571, 2589, 2599, 2605, 2609, 2613, 2617, 2619, 2623, 2629, 2721, 2745, 2747, 2749, 2753, 2917, 2923, 2925, 2929, 2937, 2939, 2941, 2945, 2949, 2967, 3065, 3067, 3085, 3089, 3121, 3123, 3125, 3131, 3135, 3137, 3149, and 3165, wherein the 5′ nucleotide represented by U of the antisense oligonucleotide is any nucleotide (e.g., U, A, G, C, T). In some aspects, the antisense strand consists of a nucleobase sequence of any one of SEQ ID NOs: 1487, 1493, 1495, 1497, 1537, 1545, 1547, 1561, 1563, 1565, 1585, 1599, 1605, 1609, 1623, 1625, 1631, 1661, 1711, 1721, 1723, 1727, 1729, 1733, 1735, 1737, 1749, 1753, 1757, 1759, 1763, 1765, 1773, 1955, 1961, 1967, 1973, 1975, 1977, 1999, 2009, 2013, 2025, 2035, 2039, 2053, 2055, 2081, 2087, 2115, 2117, 2121, 2123, 2159, 2163, 2177, 2179, 2571, 2589, 2599, 2605, 2609, 2613, 2617, 2619, 2623, 2629, 2721, 2745, 2747, 2749, 2753, 2895, 2899, 2903, 2907, 2917, 2923, 2925, 2929, 2937, 2939, 2941, 2945, 2949, 2967, 3065, 3067, 3085, 3089, 3121, 3123, 3125, 3131, 3135, 3137, 3149, and 3165, wherein the 5′ nucleotide represented by U of the antisense oligonucleotide is any nucleotide (e.g., U, A, G, C, T). In some aspects, the antisense strand consists of a nucleobase sequence of any one of SEQ ID NOs: 1585, 1599, 1605, 1609, 1711, 1721, 1723, 1727, 1729, 1733, 1735, 1737, 1749, 1753, 1757, 1759, 1763, 1765, 1773, 1999, 2009, 2013, 2025, 2721, 2745, 2747, 2749, 2753, 2917, 2923, 2925, 2929, 2937, 2939, 2941, 2945, 3121, 3123, 3125, 3131, 3135, 3137, and 3149, wherein the 5′ nucleotide represented by U of the antisense oligonucleotide is any nucleotide (e.g., U, A, G, C, T). In some aspects, the antisense strand consists of a nucleobase sequence of any one of SEQ ID NOs: 1537, 1545, 1547, 1561, 1563, 1565, 1585, 1599, 1605, 1609, 1623, 1625, 1631, 1661, 1711, 1721, 1723, 1727, 1729, 1733, 1735, 1737, 1749, 1753, 1757, 1759, 1763, 1765, 1773, 1955, 1961, 1967, 1973, 1975, 1977, 1999, 2009, 2013, 2025, 2035, 2039, 2053, 2055, 2081, 2087, 2115, 2117, 2121, 2123, 2159, 2163, 2177, 2179, 2571, 2589, 2599, 2605, 2609, 2613, 2617, 2619, 2623, 2629, 2721, 2745, 2747, 2749, 2753, 2895, 2899, 2903, 2907, 2917, 2923, 2925, 2929, 2937, 2939, 2941, 2945, 2949, 2967, 3065, 3067, 3085, 3089, 3121, 3123, 3125, 3131, 3135, 3137, 3149, 3165, 3211, 3213, 3217, 3249, 3273, 3275, 3277, 3279, and 3289, wherein the 5′ nucleotide represented by U of the antisense oligonucleotide is any nucleotide (e.g., U, A, G, C, T).

[0052] In some aspects, the dsRNA exhibits at least 50% mRNA inhibition at a 0.5 nM dsRNA concentration when determined using a cell assay when compared with a control cell. In some aspects, the dsRNA exhibits at least 40% mRNA inhibition at a 0.5 nM dsRNA concentration when determined using a cell assay when compared with a control cell. In some aspects, the dsRNA exhibits at least 30% mRNA inhibition at a 0.5 nM dsRNA concentration when determined using a cell assay when compared with a control cell. In some aspects, the dsRNA exhibits at least 60% mRNA inhibition at a 10 nM dsRNA concentration when determined using a cell assay when compared with a control cell. In some aspects, the dsRNA exhibits at least 50% mRNA inhibition at a 10 nM dsRNA concentration when determined using a cell assay when compared with a control cell.

[0053] In some aspects, the antisense strand is complementary to at least 17 contiguous nucleotides of an MLH1 gene. In some aspects, the antisense strand is complementary to at least 19 contiguous nucleotides of an MLH1 gene. In some aspects, the antisense strand is complementary to 19 contiguous nucleotides of an MLH1 gene.

[0054] In some aspects, the antisense strand and/or the sense strand comprises a 3′ overhang of at least 1 linked nucleoside; or a 3′ overhang of at least 2 linked nucleosides.

Pharmaceutical Compositions and Methods of Treatment Using dsRNAs

[0055] In some aspects, the application is directed to a pharmaceutical composition comprising one or more of the dsRNAs described herein and a pharmaceutically acceptable carrier or excipient. In some aspects, the application is directed to a composition comprising one or more of the antisense oligonucleotides described herein and a lipid nanoparticle, a polyplex nanoparticle, a lipoplex nanoparticle, or a liposome. In some aspects, the application is directed to a vector encoding at least one strand of the dsRNAs described herein. In some aspects, the application is directed to a cell comprising the vector that encodes at least one strand of the dsRNAs described herein.

[0056] In some aspects, the application is directed to a method of inhibiting transcription of MLH1 in a cell, the method comprising contacting the cell with: one or more of the dsRNAs described herein; a pharmaceutical composition of one or more of the dsRNAs described herein and a pharmaceutically acceptable carrier or excipient; or the composition of one or more of the dsRNAs described herein; a vector encoding at least one strand of the dsRNAs; or a cell comprising a vector that encodes at least one strand of the dsRNAs for a time sufficient to obtain degradation of an mRNA transcript of a MLH1 gene, thereby reducing expression of the MLH1 gene in the cell.

[0057] In some aspects, the application is directed to a method of treating, preventing, or delaying progression of a trinucleotide repeat expansion disorder in a subject in need thereof, the method comprising administering to the subject one or more of the dsRNAs described herein; a pharmaceutical composition of one or more of the dsRNAs described herein and a pharmaceutically acceptable carrier or excipient; or the composition of one or more of the dsRNAs described herein; a vector encoding at least one strand of the dsRNAs; or a cell comprising a vector that encodes at least one strand of the dsRNAs.

[0058] In some aspects, the application is directed to a method of reducing the level and/or activity of MLH1 in a cell of a subject identified as having a trinucleotide repeat expansion disorder, the method comprising contacting the cell with one or more of the dsRNAs described herein; a pharmaceutical composition of one or more of the dsRNAs described herein and a pharmaceutically acceptable carrier or excipient; or the composition of one or more of the dsRNAs described herein; a vector encoding at least one strand of the dsRNAs; or a cell comprising a vector that encodes at least one strand of the dsRNAs.

[0059] In some aspects, the application is directed to a method for reducing expression of MLH1 in a cell comprising contacting the cell with one or more of the dsRNAs described herein; a pharmaceutical composition of one or more of the dsRNAs described herein and a pharmaceutically acceptable carrier or excipient; or the composition of one or more of the dsRNAs described herein; a vector encoding at least one strand of the dsRNAs; or a cell comprising a vector that encodes at least one strand of the dsRNAs and maintaining the cell for a time sufficient to obtain degradation of an mRNA transcript of MLH1, thereby reducing expression of MLH1 in the cell.

[0060] In some aspects, the application is directed to a method of decreasing trinucleotide repeat expansion in a cell, the method comprising contacting the cell with one or more of the dsRNAs described herein; a pharmaceutical composition of one or more of the dsRNAs described herein and a pharmaceutically acceptable carrier or excipient; or the composition of one or more of the dsRNAs described herein; a vector encoding at least one strand of the dsRNAs; or a cell comprising a vector that encodes at least one strand of the dsRNAs.

[0061] In some aspects, a method of treating, preventing, or delaying the progression a disorder in a subject in need thereof wherein the subject is suffering from trinucleotide repeat expansion disorder, comprising administering to said subject the dsRNA described herein. In some aspects, the method further comprises administering a second therapeutic agent. In some aspects, the second therapeutic agent is an oligonucleotide that hybridizes to an mRNA encoding the Huntingtin gene.

[0062] In some aspects, a method of preventing or delaying the progression of a trinucleotide repeat expansion disorder in a subject, the method comprising administering to the subject a dsRNA in an amount effective to delay progression of a trinucleotide repeat expansion disorder of the subject.

[0063] In some aspects, the cell is in a subject. In some aspects, the subject is a human. In some aspects, the cell is a cell of the central nervous system or a muscle cell.

[0064] In some aspects, the subject is identified as having a trinucleotide repeat expansion disorder. In some aspects, the trinucleotide repeat expansion disorder is a polyglutamine disease. In some aspects the polyglutamine disease is selected from the group consisting of dentatorubropallidoluysian atrophy, Huntington's disease, spinal and bulbar muscular atrophy, spinocerebellar ataxia type 1, spinocerebellar ataxia type 2, spinocerebellar ataxia type 3, spinocerebellar ataxia type 6, spinocerebellar ataxia type 7, spinocerebellar ataxia type 17, or Huntington's disease-like 2. In some aspects, the trinucleotide repeat expansion disorder is Huntington's disease.

[0065] In some aspects, the trinucleotide repeat expansion disorder is a non-polyglutamine disease. IN some aspects, the non-polyglutamine disease is selected from the group consisting of fragile X syndrome, fragile X-associated tremor/ataxia syndrome, fragile XE mental retardation, Friedreich's ataxia, myotonic dystrophy type 1, spinocerebellar ataxia type 8, spinocerebellar ataxia type 12, oculopharyngeal muscular dystrophy, Fragile X-associated premature ovarian failure, FRA2A syndrome, FRA7A syndrome, or early infantile epileptic encephalopathy. In some aspects, the trinucleotide repeat expansion disorder is Friedreich's ataxia. In some aspects, the trinucleotide repeat expansion disorder is myotonic dystrophy type 1.

[0066] In some aspects, the dsRNA, pharmaceutical composition, composition, cell, or vector is administered intrathecally. In some aspects, the dsRNA, pharmaceutical composition, composition, cell, or vector is administered intraventricularly. In some aspects, the dsRNA, pharmaceutical composition, composition, cell, or vector is administered intramuscularly.

[0067] In some aspects, the progression of the trinucleotide repeat expansion disorder is delayed by at least 120 days, for example, at least 6 months, at least 12 months, at least 2 years, at least 3 years, at least 4 years, at least 5 years, at least 10 years or more, when compared with the predicted progression.

### Definitions

[0068] For convenience, the meaning of some terms and phrases used in the specification, examples, and appended claims are provided below. Unless stated otherwise, or implicit from context, the following terms and phrases include the meanings provided below. The definitions are provided to aid in describing particular aspects, and are not intended to limit the claimed technology, because the scope of the technology is limited only by the claims. Unless otherwise defined, all technical and scientific terms used herein have the same meaning as commonly understood by one of ordinary skill in the art to which this technology belongs. If there is an apparent discrepancy between the usage of a term in the art and its definition provided herein, the definition provided within the specification shall prevail.

[0069] In this application, unless otherwise clear from context, (i) the term “a” can be understood to mean “at least one”; (ii) the term “or” can be understood to mean “and/or”; and (iii) the terms “including” and “comprising” can be understood to encompass itemized components or steps whether presented by themselves or together with one or more additional components or steps.

[0070] As used herein, the terms “about” and “approximately” refer to a value that is within 10% above or below the value being described. For example, the term “about 5 nM” indicates a range of from 4.5 to 5.5 nM.

[0071] The term “at least” prior to a number or series of numbers is understood to include the number adjacent to the term “at least”, and all subsequent numbers or integers that could logically be included, as clear from context. For example, the number of nucleotides in a nucleic acid molecule must be an integer. For example, “at least 18 nucleotides of a 21-nucleotide nucleic acid molecule” means that 18, 19, 20, or 21 nucleotides have the indicated property. When at least is present before a series of numbers or a range, it is understood that “at least” can modify each of the numbers in the series or range. “At least” is also not limited to integers (e.g., “at least 5%” includes 5.0%, 5.1%, 5.18% without consideration of the number of significant figures.

[0072] As used herein, “no more than” or “less than” is understood as the value adjacent to the phrase and logical lower values or integers, as logical from context, to zero. For example, an antisense oligonucleotide with “no more than 3 mismatches to a target sequence” has 3, 2, 1, or 0 mismatches to a target sequence or a duplex with an overhang of “no more than two linked nucleosides” has a 2, 1, or 0 linked nucleoside overhang. When “no more than” is present before a series of numbers or a range, it is understood that “no more than” can modify each of the numbers in the series or range.

[0073] As used herein, the term “administration” refers to the administration of a composition (e.g., a compound or a preparation that includes a compound as described herein) to a subject or system. Administration to an animal subject (e.g., to a human) can be by any appropriate route, such as one described herein.

[0074] As used herein, a “combination therapy” or “administered in combination” means that two (or more) different agents or treatments are administered to a subject as part of a defined treatment regimen for a particular disease or condition. The treatment regimen defines the doses and periodicity of administration of each agent such that the effects of the separate agents on the subject overlap. In some aspects, the delivery of the two or more agents is simultaneous or concurrent and the agents can be co-formulated. In some aspects, the two or more agents are not co-formulated and are administered in a sequential manner as part of a prescribed regimen. In some aspects, administration of two or more agents or treatments in combination is such that the reduction in a symptom, or other parameter related to the disorder is greater than what would be observed with one agent or treatment delivered alone or in the absence of the other. The effect of the two treatments can be partially additive, wholly additive, or greater than additive (e.g., synergistic). Sequential or substantially simultaneous administration of each therapeutic agent can be effected by any appropriate route including, but not limited to, oral routes, intravenous routes, intramuscular routes, and direct absorption through mucous membrane tissues. The therapeutic agents can be administered by the same route or by different routes. For example, one therapeutic agent of the combination can be administered by intravenous injection while another therapeutic agent of the combination can be administered orally.

[0075] As used herein, the term “MLH1” refers to MutL Homolog 1, a DNA mismatch repair protein, having an amino acid sequence from any vertebrate or mammalian source, including, but not limited to, human, bovine, chicken, rodent, mouse, rat, porcine, ovine, primate, monkey, and guinea pig, unless specified otherwise. The term also refers to fragments and variants of native MLH1 that maintain at least one in vivo or in vitro activity of a native MLH1. The term encompasses full-length unprocessed precursor forms of MLH1 as well as mature forms resulting from post-translational cleavage of the signal peptide. MLH1 is encoded by the MLH1 gene. The nucleic acid sequence of an exemplary Homo sapiens (human) MLH1 gene is set forth in NCBI Reference No. NM_000249.3 or in SEQ ID NO: 1. The term “MLH1” also refers to natural variants of the wild-type MLH1 protein, such as proteins having at least 85% identity (e.g., 85%, 86%, 87%, 88%, 89%, 90%, 91%, 92%, 93%, 94%, 95%, 96%, 97%, 98%, 99%, 99.9% identity, or more) to the amino acid sequence of wild-type human MLH1, which is set forth in NCBI Reference No. NP_000240.1 or in SEQ ID NO: 2. The nucleic acid sequence of an exemplary Mus musculus (mouse) MLH1 gene is set forth in NCBI Reference No. NM_026810.2 or in SEQ ID NO: 3. The nucleic acid sequence of an exemplary Rattus norvegicus (rat) MLH1 gene is set forth in NCBI Reference No. NM_031053.1 or in SEQ ID NO: 4. The nucleic acid sequence of an exemplary Macaca fascicularis (cyno) MLH1 gene is set forth in NCBI Reference No. XM_005546623.2 or in SEQ ID NO: 5.

[0076] The term “MLH1” as used herein also refers to a particular polypeptide expressed in a cell by naturally occurring DNA sequence variations of the MLH1 gene, such as a single nucleotide polymorphism in the MLH1 gene. Numerous SNPs within the MLH1 gene have been identified and can be found at, for example, NCBI dbSNP (see, e.g., www.ncbi.nlm.nih.gov/snp). Non-limiting examples of SNPs within the MLH1 gene can be found at, NCBI dbSNP Accession Nos.: rs748766, rs1540354, rs1558528, rs1799977, rs1800146, rs1800149, rs1800734, rs2020873, rs2241031, rs2286939, rs3774332, rs3774338, rs4234259, rs4647256, rs4647269, rs9876116, rs11129748, rs11541859, rs28930073, rs34213726, rs35001569, rs35045067, rs35502531, rs35831931, rs41295280, rs41295282, rs41295284, rs41562513, rs56198082, rs63749792, rs63750114, rs63750447, rs63750549, rs63751592, rs63751684, rs63751597, rs1803985, rs2286940, rs3774339, rs4647225, rs4647277, rs9852810, rs9857293, rs13320360, and rs34285587.

[0077] As used herein, “target sequence” refers to a contiguous portion of the nucleotide sequence of an mRNA molecule formed during the transcription of an MLH1 gene, including mRNA that is a product of RNA processing of a primary transcription product. In one aspect, the target portion of the sequence will be at least long enough to serve as a substrate for antisense-oligonucleotide-directed or dsRNA-directed cleavage at or near that portion of the nucleotide sequence of an mRNA molecule formed during the transcription of a MLH1 gene. The target sequence can be, for example, from about 9-36 nucleotides in length, e.g., about 15-30 nucleotides in length. For example, the target sequence can be from about 15-30 nucleotides, 15, 16, 17, 18, 19, 20, 21, 22, 23, 24, 25, 26, 27, 28, 29, or 30 or 15-29, 15-28, 15-27, 15-26, 15-25, 15-24, 15-23, 15-22, 15-21, 15-20, 15-19, 15-18, 15-17, 18-30, 18-29, 18-28, 18-27, 18-26, 18-25, 18-24, 18-23, 18-22, 18-21, 18-20, 19-30, 19-29, 19-28, 19-27, 19-26, 19-25, 19-24, 19-23, 19-22, 19-21, 19-20, 20-30, 20-29, 20-28, 20-27, 20-26, 20-25, 20-24, 20-23, 20-22, 20-21, 21-30, 21-29, 21-28, 21-27, 21-26, 21-25, 21-24, 21-23, or 21-22 nucleotides in length. Ranges and lengths intermediate to the above recited ranges and lengths are also contemplated.

[0078] “G,” “C,” “A,” “T,” and “U” each generally stand for a naturally-occurring nucleotide that contains guanine, cytosine, adenine, thymidine, and uracil as a base, respectively. However, it will be understood that the term “nucleotide” can also refer to an alternative nucleotide, as further detailed below, or a surrogate replacement moiety. The skilled person is well aware that guanine, cytosine, adenine, and uracil can be replaced by other moieties without substantially altering the base pairing properties of a nucleotide comprising a nucleotide bearing such replacement moiety. For example, without limitation, a nucleotide comprising inosine as its base can base pair with nucleotides containing adenine, cytosine, or uracil. Hence, nucleotides containing uracil, guanine, or adenine can be replaced in the nucleotide sequences of antisense oligonucleotides or dsRNAs by a nucleotide containing, for example, inosine. In another example, adenine and cytosine anywhere in the antisense oligonucleotide or dsRNA can be replaced with guanine and uracil, respectively to form G-U Wobble base pairing with the target mRNA. Sequences containing such replacement moieties are suitable for the compositions and methods described herein.

[0079] The terms “nucleobase” and “base” include the purine (e.g. adenine and guanine) and pyrimidine (e.g. uracil, thymine, and cytosine) moiety present in nucleosides and nucleotides which form hydrogen bonds in nucleic acid hybridization. The term nucleobase also encompasses alternative nucleobases which can differ from naturally-occurring nucleobases, but are functional during nucleic acid hybridization. In this context “nucleobase” refers to both naturally occurring nucleobases such as adenine, guanine, cytosine, thymidine, uracil, xanthine, and hypoxanthine, as well as alternative nucleobases. Such variants are for example described in Hirao et al (2012) Accounts of Chemical Research vol 45 page 2055 and Bergstrom (2009) Current Protocols in Nucleic Acid Chemistry Suppl. 37 1.4.1.

[0080] The term “nucleoside” refers to a monomeric unit of an oligonucleotide or a polynucleotide having a nucleobase and a sugar moiety. A nucleoside can include those that are naturally-occurring as well as alternative nucleosides, such as those described herein. The nucleobase of a nucleoside can be a naturally-occurring nucleobase or an alternative nucleobase. Similarly, the sugar moiety of a nucleoside can be a naturally-occurring sugar or an alternative sugar.

[0081] The term “alternative nucleoside” refers to a nucleoside having an alternative sugar or an alternative nucleobase, such as those described herein.

[0082] In some aspects, the nucleobase moiety is modified by changing the purine or pyrimidine into a modified purine or pyrimidine, such as substituted purine or substituted pyrimidine, such as an “alternative nucleobase” selected from isocytosine, pseudoisocytosine, 5-methyl cytosine, 5-thiozolo-cytosine, 5-propynyl-cytosine, 5-propynyl-uridine, 5-bromouridine 5-thiazolo-uridine, 2-thio-uridine, pseudouridine, 1-methylpseudouridine, 5-methoxyuridine, 2′-thio-thymine, inosine, diaminopurine, 6-aminopurine, 2-aminopurine, 2,6-diaminopurine, and 2-chloro-6-aminopurine.

[0083] The nucleobase moieties can be indicated by the letter code for each corresponding nucleobase, e.g. A, T, G, C, or U, wherein each letter can include alternative nucleobases of equivalent function. In some aspects, e.g., for gapmers, 5-methyl cytosine LNA nucleosides can be used.

[0084] A “sugar” or “sugar moiety,” includes naturally occurring sugars having a furanose ring. A sugar also includes an “alternative sugar,” defined as a structure that is capable of replacing the furanose ring of a nucleoside. In some aspects, alternative sugars are non-furanose (or 4′-substituted furanose) rings or ring systems or open systems. Such structures include simple changes relative to the natural furanose ring, such as a six-membered ring, or can be more complicated as is the case with the non-ring system used in peptide nucleic acid. Alternative sugars can include sugar surrogates wherein the furanose ring has been replaced with another ring system such as, for example, a morpholino or hexitol ring system. Sugar moieties useful in the preparation of oligonucleotides (e.g., ASO or dsRNA) having motifs include, without limitation, β-D-ribose, β-D-2′-deoxyribose, substituted sugars (such as 2′, 5′ and bis substituted sugars), 4′-S-sugars (such as 4′-S-ribose, 4′-S-2′-deoxyribose and 4′-S-2′-substituted ribose), bicyclic alternative sugars (such as the 2′-O—CH₂-4′ or 2′-O—(CH₂)₂-4′ bridged ribose derived bicyclic sugars) and sugar surrogates (such as when the ribose ring has been replaced with a morpholino or a hexitol ring system). The type of heterocyclic base and internucleoside linkage used at each position is variable and is not a factor in determining the motif. In most nucleosides having an alternative sugar moiety, the heterocyclic nucleobase is generally maintained to permit hybridization.

[0085] A “nucleotide,” as used herein, refers to a monomeric unit of an oligonucleotide or polynucleotide that comprises a nucleoside and an internucleosidic linkage. The internucleosidic linkage can include a phosphate linkage. Similarly, “linked nucleosides” can be linked by phosphate linkages. Many “alternative internucleosidic linkages” are known in the art, including, but not limited to, phosphate, phosphorothioate, and boronophosphate linkages. Alternative nucleosides include bicyclic nucleosides (BNAs) (e.g., locked nucleosides (LNAs) and constrained ethyl (cEt) nucleosides), peptide nucleosides (PNAs), phosphotriesters, phosphorothionates, phosphoramidates, and other variants of the phosphate backbone of native nucleoside, including those described herein. An “alternative nucleotide,” as used herein, refers to a nucleotide having an alternative nucleoside or an alternative sugar, and an internucleoside linkage, which can include alternative nucleoside linkages.

[0086] The terms “oligonucleotide” and “polynucleotide” as used herein are defined as it is generally understood by the skilled person as a molecule comprising two or more covalently linked nucleosides. Such covalently bound nucleosides can be referred to as nucleic acid molecules or oligomers. Oligonucleotides are commonly made in the laboratory by solid-phase chemical synthesis followed by purification. When referring to a sequence of the oligonucleotide, reference is made to the sequence or order of nucleobase moieties, or modifications thereof, of the covalently linked nucleotides or nucleosides. The oligonucleotide can be man-made. For example, the oligonucleotide can be chemically synthesized and be purified or isolated. Oligonucleotide is also intended to include (i) compounds that have one or more furanose moieties that are replaced by furanose derivatives or by any structure, cyclic or acyclic, that can be used as a point of covalent attachment for the base moiety, (ii) compounds that have one or more phosphodiester linkages that are either modified, as in the case of phosphoramidate or phosphorothioate linkages, or completely replaced by a suitable linking moiety as in the case of formacetal or riboacetal linkages, and/or (iii) compounds that have one or more linked furanose-phosphodiester linkage moieties replaced by any structure, cyclic or acyclic, that can be used as a point of covalent attachment for the base moiety. The oligonucleotides (e.g., ASOs or dsRNA) can comprise one or more alternative nucleosides or nucleotides (e.g., including those described herein). It is also understood that oligonucleotide includes compositions lacking a sugar moiety or nucleobase but is still capable of forming a pairing with or hybridizing to a target sequence.

[0087] “Oligonucleotide” refers to a short polynucleotide (e.g., of 100 or fewer linked nucleosides). As used herein, the term “strand” refers to an oligonucleotide comprising a chain of linked nucleosides. A “strand comprising a nucleobase sequence” refers to an oligonucleotide comprising a chain of linked nucleosides that is described by the sequence referred to using the standard nucleobase nomenclature.

[0088] The term “antisense,” as used herein, refers to a nucleic acid comprising an oligonucleotide or polynucleotide that is sufficiently complementary to all or a portion of a gene, primary transcript, or processed mRNA, so as to interfere with expression of the endogenous gene (e.g., MLH1). “Complementary” polynucleotides are those that are capable of base pairing according to the standard Watson-Crick complementarity rules. Specifically, purines will base pair with pyrimidines to form a combination of guanine paired with cytosine (G:C) and adenine paired with either thymine (A:T) in the case of DNA, or adenine paired with uracil (A:U) in the case of RNA. It is understood that two polynucleotides can hybridize to each other even if they are not completely complementary to each other, provided that each has at least one region that is substantially complementary to the other.

[0089] The terms “antisense strand” and “guide strand” refer to the strand of a dsRNA that includes a region that is substantially complementary to a target sequence, e.g., an MLH1 mRNA.

[0090] The terms “sense strand” and “passenger strand,” as used herein, refer to the strand of a dsRNA that includes a region that is substantially complementary to a region of the antisense strand as that term is defined herein.

[0091] The term “dsRNA” refers to an agent that includes a sense strand and antisense strand that contains linked nucleosides as that term is defined herein. dsRNA includes, for example, siRNAs and shRNAs, which mediate the targeted cleavage of an RNA transcript via an RNA-induced silencing complex (RISC) pathway. dsRNA directs the sequence-specific degradation of mRNA through a process known as RNA interference (RNAi). The dsRNA reduces the expression of MLH1 in a cell, e.g., a cell within a subject, such as a mammalian subject. In general, the majority of linked nucleosides of each strand of a dsRNA are ribonucleosides, but as described in detail herein, each or both strands can include one or more non-ribonucleosides, e.g., deoxyribonucleosides and/or alternative nucleosides.

[0092] The terms “siRNA” and “short interfering RNA” (also known as “small interfering RNA”) refer to an RNA agent, such as a double-stranded agent, of about 10-50 nucleotides in length, the strands optionally having overhanging ends comprising, for example 1, 2, or 3 overhanging linked nucleosides, which is capable of directing or mediating RNA interference. Naturally-occurring siRNAs are generated from longer dsRNA molecules (e.g., >25 linked nucleosides in length) by a cell's RNAi machinery (e.g., Dicer or a homolog thereof).

[0093] The terms “shRNA” and “short hairpin RNA,” as used herein, refer to an RNA agent having a stem-loop structure, comprising at least two regions of complementary sequence, the degree of complementarity and orientation of the regions being sufficient such that base pairing occurs between the regions, at least two of the regions being joined by a loop region which results from a lack of base pairing between nucleobases within the loop region.

[0094] “Chimeric antisense oligonucleotides” are antisense oligonucleotides which contain two or more chemically distinct regions, each made up of at least one monomer unit, i.e., a nucleotide or nucleoside in the case of an oligonucleotide. Chimeric antisense oligonucleotides also include “gapmers.”

[0095] “Chimeric dsRNA” is dsRNA which contains two or more chemically distinct regions, each made up of at least one monomer unit, i.e., a nucleoside or nucleotide in the case of a dsRNA.

[0096] The antisense oligonucleotide can be of any length that permits specific degradation of a desired target RNA through an RNase H-mediated pathway, and can range from about 10-30 nucleosides in length, e.g., about 15-30 nucleosides in length or about 18-20 nucleosides in length, for example, about 10, 11, 12, 13, 14, 15, 16, 17, 18, 19, 20, 21, 22, 23, 24, 25, 26, 27, 28, 29, or 30 nucleosides in length, such as about 15-30, 15-29, 15-28, 15-27, 15-26, 15-25, 15-24, 15-23, 15-22, 15-21, 15-20, 15-19, 15-18, 15-17, 18-30, 18-29, 18-28, 18-27, 18-26, 18-25, 18-24, 18-23, 18-22, 18-21, 18-20, 19-30, 19-29, 19-28, 19-27, 19-26, 19-25, 19-24, 19-23, 19-22, 19-21, 19-20, 20-30, 20-29, 20-28, 20-27, 20-26, 20-25, 20-24, 20-23, 20-22, 20-21, 21-30, 21-29, 21-28, 21-27, 21-26, 21-25, 21-24, 21-23, or 21-22 nucleosides in length. Ranges and lengths intermediate to the above recited ranges and lengths are also contemplated.

[0097] As used herein, the term “antisense oligonucleotide comprising a nucleobase sequence” refers to an antisense oligonucleotide comprising a chain of nucleotides or nucleosides that is described by the sequence referred to using the standard nucleotide nomenclature.

[0098] The term “contiguous nucleobase region” refers to the region of the antisense oligonucleotide or dsRNA (e.g., the antisense strand of the dsRNA) which is complementary to the target nucleic acid. The term can be used interchangeably herein with the term “contiguous nucleotide sequence” or “contiguous nucleobase sequence.” In some aspects, all of the nucleotides of the antisense oligonucleotide or dsRNA are present in the contiguous nucleotide or nucleoside region. In some aspects the antisense oligonucleotide or dsRNA comprises the contiguous nucleotide region and can comprise further nucleotide(s) or nucleoside(s), for example a nucleotide linker region which can be used to attach a functional group to the contiguous nucleotide sequence. The nucleotide linker region can be complementary to the target nucleic acid. In some aspects the internucleoside linkages present between the nucleotides of the contiguous nucleotide region are all phosphorothioate internucleoside linkages. In some aspects, the contiguous nucleotide region comprises one or more sugar-modified nucleosides.

[0099] The term “gapmer,” as used herein, refers to an antisense oligonucleotide which comprises a region of RNase H recruiting oligonucleotides (gap or DNA core) which is flanked 5′ and 3′ by regions which comprise one or more affinity enhancing alternative nucleosides (wings or flanking sequence). Various gapmer designs are described herein. Headmers and tailmers are oligonucleotides capable of recruiting RNase H where one of the flanks is missing, i.e. only one of the ends of the oligonucleotide comprises affinity enhancing alternative nucleosides. For headmers the 3′ flanking sequence is missing (i.e. the 5′ flanking sequence comprises affinity enhancing alternative nucleosides) and for tailmers the 5′ flanking sequence is missing (i.e. the 3′ flanking sequence comprises affinity enhancing alternative nucleosides). A “mixed flanking sequence gapmer” refers to a gapmer wherein the flanking sequences comprise at least one alternative nucleoside, such as at least one DNA nucleoside or at least one 2′ substituted alternative nucleoside, such as, for example, 2′-O-alkyl-RNA, 2′-O-methyl-RNA, 2′-alkoxy-RNA, 2′-O-methoxyethyl-RNA (MOE), 2′-amino-DNA, 2′-Fluoro-RNA, 2′-F-ANA nucleoside(s), or bicyclic nucleosides (e.g., locked nucleosides or constrained ethyl (cEt) nucleosides). In some aspects the mixed flanking sequence gapmer has one flanking sequence which comprises alternative nucleosides (e.g. 5′ or 3′) and the other flanking sequence (3′ or 5′ respectfully) comprises 2′ substituted alternative nucleoside(s).

[0100] The duplex region of the dsRNA can be of any length that permits specific degradation of a desired target RNA through a RISC pathway, and can range from about 9 to 36 base pairs in length, e.g., about 10-30 base pairs in length, e.g., about 15-30 base pairs in length or about 18-20 base pairs in length, for example, about 9, 10, 11, 12, 13, 14, 15, 16, 17, 18, 19, 20, 21, 22, 23, 24, 25, 26, 27, 28, 29, 30, 31, 32, 33, 34, 35, or 36 base pairs in length, such as about 15-30, 15-29, 15-28, 15-27, 15-26, 15-25, 15-24, 15-23, 15-22, 15-21, 15-20, 15-19, 15-18, 15-17, 18-30, 18-29, 18-28, 18-27, 18-26, 18-25, 18-24, 18-23, 18-22, 18-21, 18-20, 19-30, 19-29, 19-28, 19-27, 19-26, 19-25, 19-24, 19-23, 19-22, 19-21, 19-20, 20-30, 20-29, 20-28, 20-27, 20-26, 20-25, 20-24, 20-23, 20-22, 20-21, 21-30, 21-29, 21-28, 21-27, 21-26, 21-25, 21-24, 21-23, or 21-22 base pairs in length. Ranges and lengths intermediate to the above recited ranges and lengths are also contemplated.

[0101] The two strands forming the duplex structure can be different portions of one longer oligonucleotide molecule, or they can be separate oligonucleotide molecules. Where the two strands are part of one larger molecule, and therefore are connected by an uninterrupted chain of linked nucleosides between the 3′-end of one strand and the 5′-end of the respective other strand forming the duplex structure, the connecting chain is referred to as a “hairpin loop.” A hairpin loop can comprise at least one unpaired nucleobase. In some aspects, the hairpin loop can comprise at least 2, at least 3, at least 4, at least 5, at least 6, at least 7, at least 8, at least 9, at least 10, at least 20, at least 23 or more unpaired nucleobases. In some aspects, the hairpin loop can be 10 or fewer linked nucleosides. In some aspects, the hairpin loop can be 8 or fewer unpaired nucleobases. In some aspects, the hairpin loop can be 4-10 unpaired nucleobases. In some aspects, the hairpin loop can be 4-8 linked nucleosides.

[0102] Multiple dsRNAs can be joined together by a linker. The linker can be cleavable or non-cleavable. The dsRNAs can be the same or different.

[0103] In one aspect, each strand of the dsRNA includes 19-23 linked nucleosides that interacts with a target RNA sequence, e.g., an MLH1 target mRNA sequence, to direct the cleavage of the target RNA. Without wishing to be bound by theory, long double stranded RNA introduced into cells is broken down by a Type III endonuclease known as Dicer (Sharp et al. (2001) Genes Dev. 15:485). Dicer, a ribonuclease-Ill-like enzyme, processes the RNA into 19-23 base pair short interfering RNAs with characteristic two-base 3′ overhangs (Bernstein, et al., (2001) Nature 409:363). The dsRNAs are then incorporated into an RNA-induced silencing complex (RISC) where one or more helicases unwind the dsRNA duplex, enabling the complementary antisense strand to guide target recognition (Nykanen, et al., (2001) Cell 107:309). Upon binding to the appropriate target mRNA, one or more endonucleases within the RISC cleave the target to induce silencing (Elbashir, et al., (2001) Genes Dev. 15:188). Where the two substantially complementary strands of a dsRNA are comprised of separate RNA molecules, those molecules need not, but can be covalently connected. Where the two strands are connected covalently by means other than an uninterrupted chain of nucleotides between the 3′-end of one strand and the 5′-end of the respective other strand forming the duplex structure, the connecting structure is referred to as a “linker.”

[0104] “Linker” or “linking group,” as applied to a dsRNA, means an organic moiety that connects two parts of a compound, e.g., covalently attaches two parts of a compound. The RNA strands can have the same or a different number of linked nucleosides. The maximum number of base pairs is the number of linked nucleosides in the shortest strand of the dsRNA minus any overhangs that are present in the duplex. In addition to the duplex structure, a dsRNA can comprise one or more nucleoside overhangs. In one aspect of the dsRNA, at least one strand comprises a 3′ overhang of at least 1 nucleoside. In another aspect, at least one strand comprises a 3′ overhang of at least 2 linked nucleosides, e.g., 2, 3, 4, 5, 6, 7, 9, 10, 11, 12, 13, 14, or 15 linked nucleosides. In other aspects, at least one strand of the dsRNA comprises a 5′ overhang of at least 1 nucleoside. In some aspects, at least one strand comprises a 5′ overhang of at least 2 linked nucleosides, e.g., 2, 3, 4, 5, 6, 7, 9, 10, 11, 12, 13, 14, or 15 linked nucleosides. In still other aspects, both the 3′ and the 5′ end of one strand of the dsRNA comprise an overhang of at least 1 nucleoside.

[0105] A linker or linking group is a connection between two atoms that links one chemical group or segment of interest to another chemical group or segment of interest via one or more covalent bonds. Conjugate moieties can be attached to the antisense oligonucleotide or dsRNA directly or through a linking moiety (e.g. linker or tether). Linkers serve to covalently connect a third region, e.g. a conjugate moiety to an antisense oligonucleotide or dsRNA (e.g. the termini of region A or C). In some aspects, the conjugate, antisense oligonucleotide conjugate, or dsRNA comprises a linker region which is positioned between the antisense oligonucleotide or dsRNA and the conjugate moiety. In some aspects, the linker between the antisense conjugate and oligonucleotide or dsRNA is biocleavable. Phosphodiester containing biocleavable linkers are described in more detail in WO 2014/076195 (herein incorporated by reference).

[0106] As used herein, the term “nucleoside overhang” refers to at least one unpaired nucleobase that protrudes from the duplex structure of a dsRNA. For example, when a 3′-end of one strand of a dsRNA extends beyond the 5′-end of the other strand, or vice versa, there is a nucleoside overhang. A dsRNA can comprise an overhang of at least one nucleoside; alternatively, the overhang can comprise at least two nucleosides, at least three nucleosides, at least four nucleosides, at least five nucleosides or more. A nucleoside overhang can comprise or consist of an alternative nucleoside, including a deoxynucleotide/nucleoside. A nucleoside overhang can comprise or consist of one or more phosphorothioates bonds. The overhang(s) can be on the sense strand, the antisense strand, or any combination thereof. Furthermore, the nucleoside(s) of an overhang can be present on the 5′-end, 3′-end or both ends of either an antisense or sense strand of a dsRNA. In some aspects, the overhang includes a self-complementary portion such that the overhang is capable of forming a hairpin structure that is stable under physiological conditions.

[0107] The terms “blunt” and “blunt ended,” as used herein in reference to a dsRNA, mean that there are no unpaired nucleobases at a given terminal end of a dsRNA, i.e., no nucleoside overhang. One or both ends of a dsRNA can be blunt. Where both ends of a dsRNA are blunt, the dsRNA is said to be blunt ended. To be clear, a “blunt ended” dsRNA is a dsRNA that is blunt at both ends, i.e., no nucleoside overhang at either end of the molecule. Most often such a molecule will be double stranded over its entire length. As used herein, the term “cleavage region” refers to a region that is located immediately adjacent to the cleavage site. The cleavage site is the site on the target at which cleavage occurs. In some aspects, the cleavage region comprises three bases on either end of, and immediately adjacent to, the cleavage site. In some aspects, the cleavage region comprises two bases on either end of, and immediately adjacent to, the cleavage site. In some aspects, the cleavage site specifically occurs at the site bound by nucleosides 10 and 11 of the antisense strand, and the cleavage region comprises nucleosides 11, 12, and 13.

[0108] The term “contiguous nucleobase region” refers to the region of the dsRNA (e.g., the antisense strand of the dsRNA) which is complementary to the target nucleic acid. The term can be used interchangeably herein with the term “contiguous nucleotide sequence” or “contiguous nucleobase sequence.” In some aspects, all the nucleotides of the dsRNA are present in the contiguous nucleotide or nucleoside region. In some aspects, the dsRNA comprises the contiguous nucleotide region and can comprise further nucleotide(s) or nucleoside(s), for example a nucleotide linker region which can be used to attach a functional group to the contiguous nucleotide sequence. The nucleotide linker region can be complementary to the target nucleic acid. In some aspects, the internucleoside linkages present between the nucleotides of the contiguous nucleotide region are all phosphorothioate internucleoside linkages. In some aspects, the contiguous nucleotide region comprises one or more sugar-modified nucleosides.

[0109] As used herein, and unless otherwise indicated, the term “complementary,” when used to describe a first nucleotide or nucleoside sequence in relation to a second nucleotide or nucleoside sequence, refers to the ability of an oligonucleotide or polynucleotide comprising the first nucleotide or nucleoside sequence to hybridize and form a duplex structure under certain conditions with an oligonucleotide or polynucleotide comprising the second nucleotide sequence, as will be understood by the skilled person. Such conditions can, for example, be stringent conditions, where stringent conditions can include: 400 mM NaCl, 40 mM PIPES pH 6.4, 1 mM EDTA, 50° C., or 70° C., for 12-16 hours followed by washing (see, e.g., “Molecular Cloning: A Laboratory Manual, Sambrook, et al. (1989) Cold Spring Harbor Laboratory Press). Other conditions, such as physiologically relevant conditions as can be encountered inside an organism, can be used. The skilled person will be able to determine the set of conditions most appropriate for a test of complementarity of two sequences in accordance with the ultimate application of the hybridized nucleotides or nucleosides.

[0110] “Complementary” sequences, as used herein, can include, or be formed entirely from, non-Watson-Crick base pairs and/or base pairs formed from non-natural and alternative nucleotides or nucleosides, in so far as the above requirements with respect to their ability to hybridize are fulfilled. Such non-Watson-Crick base pairs include, but are not limited to, G:U Wobble or Hoogstein base pairing. Complementary sequences within a dsRNA or between an antisense oligonucleotide and a target sequence as described herein, include base-pairing of the oligonucleotide or polynucleotide comprising a first nucleotide or nucleoside sequence to an oligonucleotide or polynucleotide comprising a second nucleotide or nucleoside sequence over the entire length of one or both nucleotide or nucleoside sequences. Such sequences can be referred to as “fully complementary” with respect to each other herein. However, where a first sequence is referred to as “substantially complementary” with respect to a second sequence herein, the two sequences can be fully complementary, or they can form one or more, but generally not more than 5, 4, 3 or 2 mismatched base pairs upon hybridization for a duplex up to 30 base pairs, while retaining the ability to hybridize under the conditions most relevant to their ultimate application, e.g., inhibition of gene expression via an RNase H-mediated pathway or reduction of expression via a RISC pathway. “Substantially complementary” can also refer to a polynucleotide that is substantially complementary to a contiguous portion of the mRNA of interest (e.g., an mRNA encoding MLH1). For example, a polynucleotide is complementary to at least a part of a MLH1 mRNA if the sequence is substantially complementary to a non-interrupted portion of an mRNA encoding MLH1. However, where two oligonucleotides of a dsRNA are designed to form, upon hybridization, one or more single stranded overhangs, such overhangs shall not be regarded as mismatches with regard to the determination of complementarity. For example, a dsRNA comprising one oligonucleotide of 21 linked nucleosides in length and another oligonucleotide of 23 nucleosides in length, wherein the longer oligonucleotide comprises a sequence of 21 linked nucleosides that is fully complementary to the shorter oligonucleotide, can be referred to as “fully complementary” for the purposes described herein.

[0111] As used herein, the term “region of complementarity” refers to the region on the antisense oligonucleotide or the antisense strand of the dsRNA that is substantially complementary to all or a portion of a gene, primary transcript, a sequence (e.g., a target sequence, e.g., an MLH1 nucleotide sequence), or processed mRNA, so as to interfere with expression of the endogenous gene (e.g., MLH1). Where the region of complementarity is not fully complementary to the target sequence, the mismatches can be in the internal or terminal regions of the molecule. Generally, the most tolerated mismatches are in the terminal regions, e.g., within 5, 4, 3, or 2 nucleotides of the 5′- and/or 3′-terminus of the antisense oligonucleotide or the antisense strand of the dsRNA.

[0112] As used herein, an “agent that reduces the level and/or activity of MLH1” refers to any polynucleotide agent (e.g., an antisense oligonucleotide or a dsRNA, e.g., siRNA or shRNA) that reduces the level of or inhibits expression of MLH1 in a cell or subject. The phrase “inhibiting expression of MLH1,” as used herein, includes inhibition of expression of any MLH1 gene (such as, e.g., a mouse MLH1 gene, a rat MLH1 gene, a monkey MLH1 gene, or a human MLH1 gene) as well as variants or mutants of a MLH1 gene that encode a MLH1 protein. Thus, the MLH1 gene can be a wild-type MLH1 gene, a mutant MLH1 gene, or a transgenic MLH1 gene in the context of a genetically manipulated cell, group of cells, or organism.

[0113] By “reducing the activity of MLH1” is meant decreasing the level of an activity related to MLH1 (e.g., by reducing the amount of trinucleotide repeats in a gene associated with a trinucleotide repeat expansion disorder that is related to MLH1 activity). The activity level of MLH1 can be measured using any method known in the art (e.g., by directly sequencing a gene associated with a trinucleotide repeat expansion disorder to measure the levels of trinucleotide repeats).

[0114] By “reducing the level of MLH1” is meant decreasing the level of MLH1 in a cell or subject, e.g., by administering an antisense oligonucleotide or dsRNA to the cell or subject. The level of MLH1 can be measured using any method known in the art (e.g., by measuring the levels of MLH1 mRNA or levels of MLH1 protein in a cell or a subject).

[0115] By “modulating the activity of a MutLa heterodimer comprising MLH1” is meant altering the level of an activity related to a MutLa heterodimer, or a related downstream effect. The activity level of a MutLa heterodimer can be measured using any method known in the art.

[0116] As used herein, the term “inhibitor” refers to any agent which reduces the level and/or activity of a protein (e.g., MLH1). Non-limiting examples of inhibitors include polynucleotides (e.g., antisense oligonucleotide or dsRNA, e.g., siRNA or shRNA). The term “inhibiting,” as used herein, is used interchangeably with “reducing,” “silencing,” “downregulating,” “suppressing,” and other similar terms, and includes any level of inhibition/reduction.

[0117] The phrases “contacting a cell with an antisense oligonucleotide,” such as an antisense oligonucleotide, and “contacting a cell with a dsRNA,” such as dsRNA, as used herein, includes contacting a cell by any possible means. Contacting a cell with an antisense oligonucleotide or a dsRNA includes contacting a cell in vitro with the antisense oligonucleotide or dsRNA or contacting a cell in vivo with the antisense oligonucleotide or dsRNA. The contacting can be done directly or indirectly. Thus, for example, the antisense oligonucleotide or dsRNA can be put into physical contact with the cell by the individual performing the method, or alternatively, the antisense oligonucleotide or dsRNA agent can be put into a situation that will permit or cause it to subsequently come into contact with the cell.

[0118] Contacting a cell in vitro can be done, for example, by incubating the cell with the antisense oligonucleotide or dsRNA. Contacting a cell in vivo can be done, for example, by injecting the antisense oligonucleotide or dsRNA into or near the tissue where the cell is located, or by injecting the antisense oligonucleotide or dsRNA agent into another area, e.g., the bloodstream or the subcutaneous space, such that the agent will subsequently reach the tissue where the cell to be contacted is located. For example, the antisense oligonucleotide or dsRNA can contain and/or be coupled to a ligand, e.g., GalNAc3 coupled to the antisense oligonucleotide, that directs the antisense oligonucleotide or dsRNA to a site of interest, e.g., the liver. Combinations of in vitro and in vivo methods of contacting are also possible. For example, a cell can be contacted in vitro with an antisense oligonucleotide or dsRNA and subsequently transplanted into a subject.

[0119] In one aspect, contacting a cell with an antisense oligonucleotide or dsRNA includes “introducing” or “delivering the antisense oligonucleotide or dsRNA into the cell” by facilitating or effecting uptake or absorption into the cell. Absorption or uptake of an antisense oligonucleotide or dsRNA can occur through unaided diffusive or active cellular processes, or by auxiliary agents or devices. Introducing an antisense oligonucleotide or dsRNA into a cell can be in vitro and/or in vivo. For example, for in vivo introduction, antisense oligonucleotides or dsRNAs can be injected into a tissue site or administered systemically. In vitro introduction into a cell includes methods known in the art such as electroporation and lipofection. Further approaches are described herein below and/or are known in the art.

[0120] As used herein, “lipid nanoparticle” or “LNP” is a vesicle comprising a lipid layer encapsulating a pharmaceutically active molecule, such as a nucleic acid molecule, e.g., an antisense oligonucleotide or a dsRNA or plasma from which a dsRNA is transcribed. LNP refers to a stable nucleic acid-lipid particle. LNPs typically contain a cationic lipid, a non-cationic lipid, and a lipid that prevents aggregation of the particle (e.g., a PEG-lipid conjugate). LNPs are described in, for example, U.S. Pat. Nos. 6,858,225; 6,815,432; 8,158,601; and 8,058,069, the entire contents of which are hereby incorporated herein by reference.

[0121] As used herein, the term “liposome” refers to a vesicle composed of amphiphilic lipids arranged in at least one bilayer, e.g., one bilayer or a plurality of bilayers. Liposomes include unilamellar and multilamellar vesicles that have a membrane formed from a lipophilic material and an aqueous interior. The aqueous portion contains the antisense oligonucleotide or dsRNA composition. The lipophilic material isolates the aqueous interior from an aqueous exterior, which typically does not include the antisense oligonucleotide or dsRNA composition, although in some examples, it can. Liposomes also include “sterically stabilized” liposomes, a term which, as used herein, refers to liposomes comprising one or more specialized lipids that, when incorporated into liposomes, result in enhanced circulation lifetimes relative to liposomes lacking such specialized lipids.

[0122] “Micelles” are defined herein as a particular type of molecular assembly in which amphipathic molecules are arranged in a spherical structure such that all the hydrophobic portions of the molecules are directed inward, leaving the hydrophilic portions in contact with the surrounding aqueous phase. The converse arrangement exists if the environment is hydrophobic.

[0123] The term “antisense,” as used herein, refers to a nucleic acid comprising an oligonucleotide or polynucleotide that is sufficiently complementary to all or a portion of a gene, primary transcript, or processed mRNA, so as to interfere with expression of the endogenous gene (e.g., MLH1). “Complementary” polynucleotides are those that are capable of base pairing according to the standard Watson-Crick complementarity rules. Specifically, purines will base pair with pyrimidines to form a combination of guanine paired with cytosine (G:C) and adenine paired with either thymine (A:T) in the case of DNA, or adenine paired with uracil (A:U) in the case of RNA. It is understood that two polynucleotides can hybridize to each other even if they are not completely complementary to each other, provided that each has at least one region that is substantially complementary to the other.

[0124] As used herein, the terms “effective amount,” “therapeutically effective amount,” and “a “sufficient amount” of an agent that reduces the level and/or activity of MLH1 (e.g., in a cell or a subject) described herein refer to a quantity sufficient to, when administered to the subject, including a human, effect beneficial or desired results, including clinical results, and, as such, an “effective amount” or synonym thereto depends on the context in which it is being applied. For example, in the context of treating a trinucleotide repeat expansion disorder, it is an amount of the agent that reduces the level and/or activity of MLH1 sufficient to achieve a treatment response as compared to the response obtained without administration of the agent that reduces the level and/or activity of MLH1. The amount of a given agent that reduces the level and/or activity of MLH1 described herein that will correspond to such an amount will vary depending upon various factors, such as the given agent, the pharmaceutical formulation, the route of administration, the type of disease or disorder, the identity of the subject (e.g., age, sex, and/or weight) or host being treated, and the like, but can nevertheless be routinely determined by one of skill in the art. Also, as used herein, a “therapeutically effective amount” of an agent that reduces the level and/or activity of MLH1 of the present disclosure is an amount which results in a beneficial or desired result in a subject as compared to a control. As defined herein, a therapeutically effective amount of an agent that reduces the level and/or activity of MLH1 of the present disclosure can be readily determined by one of ordinary skill by routine methods known in the art. Dosage regimen can be adjusted to provide the optimum therapeutic response.

[0125] “Prophylactically effective amount,” as used herein, is intended to include the amount of an antisense oligonucleotide or a dsRNA that, when administered to a subject having or predisposed to have a trinucleotide repeat expansion disorder, is sufficient to prevent or ameliorate the disease or one or more symptoms of the disease. Ameliorating the disease includes slowing the course of the disease or reducing the severity of later-developing disease. The “prophylactically effective amount” can vary depending on the antisense oligonucleotide or dsRNA, how the agent is administered, the degree of risk of disease, and the history, age, weight, family history, genetic makeup, the types of preceding or concomitant treatments, if any, and other individual characteristics of the patient to be treated. A prophylactically effective amount can refer to, for example, an amount of the agent that reduces the level and/or activity of MLH1 (e.g., in a cell or a subject) described herein or can refer to a quantity sufficient to, when administered to the subject, including a human, delay the onset of one or more of the trinucleotide repeat disorders described herein by at least 120 days, for example, at least 6 months, at least 12 months, at least 2 years, at least 3 years, at least 4 years, at least 5 years, at least 10 years or more, when compared with the predicted onset.

[0126] A “therapeutically-effective amount” or “prophylactically effective amount” also includes an amount (either administered in a single or in multiple doses) of an antisense oligonucleotide or a dsRNA that produces some desired local or systemic effect at a reasonable benefit/risk ratio applicable to any treatment. The antisense oligonucleotides or dsRNAs employed in the methods described herein can be administered in a sufficient amount to produce a reasonable benefit/risk ratio applicable to such treatment.

[0127] As used herein, the term “region of complementarity” refers to the region on the antisense oligonucleotide or antisense strands of the dsRNA that is substantially complementary to all or a portion of a gene, primary transcript, a sequence (e.g., a target sequence, e.g., an MLH1 nucleotide sequence), or processed mRNA, so as to interfere with expression of the endogenous gene (e.g., MLH1). Where the region of complementarity is not fully complementary to the target sequence, the mismatches can be in the internal or terminal regions of the molecule. Generally, the most tolerated mismatches are in the terminal regions, e.g., within 5, 4, 3, or 2 nucleotides of the 5′- and/or 3′-terminus of the antisense oligonucleotide or dsRNA.

[0128] An “amount effective to reduce trinucleotide repeat expansion” of a particular gene refers to an amount of the agent that reduces the level and/or activity of MLH1 (e.g., in a cell or a subject) described herein, or to a quantity sufficient to, when administered to the subject, including a human, to reduce the trinucleotide repeat expansion of a particular gene (e.g., a gene associated with a trinucleotide repeat expansion disorder described herein).

[0129] As used herein, the term “a subject identified as having a trinucleotide repeat expansion disorder” refers to a subject identified as having a molecular or pathological state, disease or condition of or associated with a trinucleotide repeat expansion disorder, such as the identification of a trinucleotide repeat expansion disorder or symptoms thereof, or to identification of a subject having or suspected of having a trinucleotide repeat expansion disorder who can benefit from a particular treatment regimen.

[0130] As used herein, “trinucleotide repeat expansion disorder,” refers to a class of genetic diseases or disorders characterized by excessive trinucleotide repeats (e.g., trinucleotide repeats such as CAG) in a gene or intron in the subject which exceed the normal, stable threshold, for the gene or intron. Trinucleotide repeats are common in the human genome and are not normally associated with disease. In some cases, however, the number of trinucleotide repeats expands beyond a stable threshold and can lead to disease, with the severity of symptoms generally correlated with the number of trinucleotide repeats. Trinucleotide repeat expansion disorders include “polyglutamine” and “non-polyglutamine” disorders.

[0131] By “determining the level of a protein” is meant the detection of a protein, or an mRNA encoding the protein, by methods known in the art either directly or indirectly. “Directly determining” means performing a process (e.g., performing an assay or test on a sample or “analyzing a sample” as that term is defined herein) to obtain the physical entity or value. “Indirectly determining” refers to receiving the physical entity or value from another party or source (e.g., a third-party laboratory that directly acquired the physical entity or value). Methods to measure protein level generally include, but are not limited to, western blotting, immunoblotting, enzyme-linked immunosorbent assay (ELISA), radioimmunoassay (RIA), immunoprecipitation, immunofluorescence, surface plasmon resonance, chemiluminescence, fluorescent polarization, phosphorescence, immunohistochemical analysis, matrix-assisted laser desorption/ionization time-of-flight (MALDI-TOF) mass spectrometry, liquid chromatography (LC)-mass spectrometry, microcytometry, microscopy, fluorescence activated cell sorting (FACS), and flow cytometry, as well as assays based on a property of a protein including, but not limited to, enzymatic activity or interaction with other protein partners. Methods to measure mRNA levels are known in the art.

[0132] “Percent (%) sequence identity” with respect to a reference polynucleotide or polypeptide sequence is defined as the percentage of nucleic acids or amino acids in a candidate sequence that are identical to the nucleic acids or amino acids in the reference polynucleotide or polypeptide sequence, after aligning the sequences and introducing gaps, if necessary, to achieve the maximum percent sequence identity. Alignment for purposes of determining percent nucleic acid or amino acid sequence identity can be achieved in various ways that are within the capabilities of one of skill in the art, for example, using publicly available computer software such as BLAST, BLAST-2, or Megalign software. Those skilled in the art can determine appropriate parameters for aligning sequences, including any algorithms needed to achieve maximal alignment over the full length of the sequences being compared. For example, percent sequence identity values can be generated using the sequence comparison computer program BLAST. As an illustration, the percent sequence identity of a given nucleic acid or amino acid sequence, A, to, with, or against a given nucleic acid or amino acid sequence, B, (which can alternatively be phrased as a given nucleic acid or amino acid sequence, A that has a certain percent sequence identity to, with, or against a given nucleic acid or amino acid sequence, B) is calculated as follows:

100 multiplied by (the fraction X/Y)

[0133] where X is the number of nucleotides or amino acids scored as identical matches by a sequence alignment program (e.g., BLAST) in that program's alignment of A and B, and where Y is the total number of nucleic acids in B. It will be appreciated that where the length of nucleic acid or amino acid sequence A is not equal to the length of nucleic acid or amino acid sequence B, the percent sequence identity of A to B will not equal the percent sequence identity of B to A.

[0134] By “level” is meant a level or activity of a protein, or mRNA encoding the protein (e.g., MLH1), optionally as compared to a reference. The reference can be any useful reference, as defined herein. By a “decreased level” or an “increased level” of a protein is meant a decrease or increase in protein level, as compared to a reference (e.g., a decrease or an increase by about 5%, about 10%, about 15%, about 20%, about 25%, about 30%, about 35%, about 40%, about 45%, about 50%, about 55%, about 60%, about 65%, about 70%, about 75%, about 80%, about 85%, about 90%, about 95%, about 100%, about 150%, about 200%, about 300%, about 400%, about 500%, or more; a decrease or an increase of more than about 10%, about 15%, about 20%, about 50%, about 75%, about 100%, or about 200%, as compared to a reference; a decrease or an increase by less than about 0.01-fold, about 0.02-fold, about 0.1-fold, about 0.3-fold, about 0.5-fold, about 0.8-fold, or less; or an increase by more than about 1.2-fold, about 1.4-fold, about 1.5-fold, about 1.8-fold, about 2.0-fold, about 3.0-fold, about 3.5-fold, about 4.5-fold, about 5.0-fold, about 10-fold, about 15-fold, about 20-fold, about 30-fold, about 40-fold, about 50-fold, about 100-fold, about 1000-fold, or more). A level of a protein can be expressed in mass/vol (e.g., g/dL, mg/mL, μg/mL, ng/mL) or percentage relative to total protein or mRNA in a sample.

[0135] The term “pharmaceutical composition,” as used herein, represents a composition containing a compound described herein formulated with a pharmaceutically acceptable excipient, and can be manufactured or sold with the approval of a governmental regulatory agency as part of a therapeutic regimen for the treatment of disease in a mammal. Pharmaceutical compositions can be formulated, for example, for oral administration in unit dosage form (e.g., a tablet, capsule, caplet, gelcap, or syrup); for topical administration (e.g., as a cream, gel, lotion, or ointment); for intravenous administration (e.g., as a sterile solution free of particulate emboli and in a solvent system suitable for intravenous use); for intrathecal injection; for intracerebroventricular injections; for intraparenchymal injection; or in any other pharmaceutically acceptable formulation.

[0136] A “pharmaceutically acceptable excipient,” as used herein, refers any ingredient other than the compounds described herein (for example, a vehicle capable of suspending or dissolving the active compound) and having the properties of being substantially nontoxic and non-inflammatory in a patient. Excipients can include, for example: antiadherents, antioxidants, binders, coatings, compression aids, disintegrants, dyes (colors), emollients, emulsifiers, fillers (diluents), film formers or coatings, flavors, fragrances, glidants (flow enhancers), lubricants, preservatives, printing inks, sorbents, suspensing or dispersing agents, sweeteners, and waters of hydration. Exemplary excipients include, but are not limited to: butylated hydroxytoluene (BHT), calcium carbonate, calcium phosphate (dibasic), calcium stearate, croscarmellose, crosslinked polyvinyl pyrrolidone, citric acid, crospovidone, cysteine, ethylcellulose, gelatin, hydroxypropyl cellulose, hydroxypropyl methylcellulose, lactose, magnesium stearate, maltitol, mannitol, methionine, methylcellulose, methyl paraben, microcrystalline cellulose, polyethylene glycol, polyvinyl pyrrolidone, povidone, pregelatinized starch, propyl paraben, retinyl palmitate, shellac, silicon dioxide, sodium carboxymethyl cellulose, sodium citrate, sodium starch glycolate, sorbitol, starch (corn), stearic acid, sucrose, talc, titanium dioxide, vitamin A, vitamin E, vitamin C, and xylitol.

[0137] As used herein, the term “pharmaceutically acceptable salt” means any pharmaceutically acceptable salt of the compound of any of the compounds described herein. For example, pharmaceutically acceptable salts of any of the compounds described herein include those that are within the scope of sound medical judgment, suitable for use in contact with the tissues of humans and animals without undue toxicity, irritation, allergic response and are commensurate with a reasonable benefit/risk ratio. Pharmaceutically acceptable salts are well known in the art. For example, pharmaceutically acceptable salts are described in: Berge et al., J. Pharmaceutical Sciences 66:1-19, 1977 and in Pharmaceutical Salts: Properties, Selection, and Use, (Eds. P. H. Stahl and C. G. Wermuth), Wiley-VCH, 2008. The salts can be prepared in situ during the final isolation and purification of the compounds described herein or separately by reacting a free base group with a suitable organic acid.

[0138] The compounds described herein can have ionizable groups so as to be capable of preparation as pharmaceutically acceptable salts. These salts can be acid addition salts involving inorganic or organic acids or the salts can, in the case of acidic forms of the compounds described herein, be prepared from inorganic or organic bases. Frequently, the compounds are prepared or used as pharmaceutically acceptable salts prepared as addition products of pharmaceutically acceptable acids or bases. Suitable pharmaceutically acceptable acids and bases and methods for preparation of the appropriate salts are well-known in the art. Salts can be prepared from pharmaceutically acceptable non-toxic acids and bases including inorganic and organic acids and bases. Representative acid addition salts include acetate, adipate, alginate, ascorbate, aspartate, benzenesulfonate, benzoate, bisulfate, borate, butyrate, camphorate, camphorsulfonate, citrate, cyclopentanepropionate, digluconate, dodecylsulfate, ethanesulfonate, fumarate, glucoheptonate, glycerophosphate, hemisulfate, heptonate, hexanoate, hydrobromide, hydrochloride, hydroiodide, 2-hydroxy-ethanesulfonate, lactobionate, lactate, laurate, lauryl sulfate, malate, maleate, malonate, methanesulfonate, 2-naphthalenesulfonate, nicotinate, nitrate, oleate, oxalate, palmitate, pamoate, pectinate, persulfate, 3-phenylpropionate, phosphate, picrate, pivalate, propionate, stearate, succinate, sulfate, tartrate, thiocyanate, toluenesulfonate, undecanoate, and valerate salts. Representative alkali or alkaline earth metal salts include sodium, lithium, potassium, calcium, and magnesium, as well as nontoxic ammonium, quaternary ammonium, and amine cations, including, but not limited to ammonium, tetramethylammonium, tetraethylammonium, methylamine, dimethylamine, trimethylamine, triethylamine, and ethylamine.

[0139] By a “reference” is meant any useful reference used to compare protein or mRNA levels or activity. The reference can be any sample, standard, standard curve, or level that is used for comparison purposes. The reference can be a normal reference sample or a reference standard or level. A “reference sample” can be, for example, a control, e.g., a predetermined negative control value such as a “normal control” or a prior sample taken from the same subject; a sample from a normal healthy subject, such as a normal cell or normal tissue; a sample (e.g., a cell or tissue) from a subject not having a disease; a sample from a subject that is diagnosed with a disease, but not yet treated with a compound described herein; a sample from a subject that has been treated by a compound described herein; or a sample of a purified protein (e.g., any described herein) at a known normal concentration. By “reference standard or level” is meant a value or number derived from a reference sample. A “normal control value” is a pre-determined value indicative of non-disease state, e.g., a value expected in a healthy control subject. Typically, a normal control value is expressed as a range (“between X and Y”), a high threshold (“no higher than X”), or a low threshold (“no lower than X”). A subject having a measured value within the normal control value for a particular biomarker is typically referred to as “within normal limits” for that biomarker. A normal reference standard or level can be a value or number derived from a normal subject not having a disease or disorder (e.g., a trinucleotide repeat expansion disorder); a subject that has been treated with a compound described herein. In some aspects, the reference sample, standard, or level is matched to the sample subject sample by at least one of the following criteria: age, weight, sex, disease stage, and overall health. A standard curve of levels of a purified protein, e.g., any described herein, within the normal reference range can also be used as a reference.

[0140] As used herein, the term “subject” refers to any organism to which a composition can be administered, e.g., for experimental, diagnostic, prophylactic, and/or therapeutic purposes. Typical subjects include any animal (e.g., mammals such as mice, rats, rabbits, non-human primates, and humans). A subject can seek or be in need of treatment, require treatment, be receiving treatment, be receiving treatment in the future, or be a human or animal who is under care by a trained professional for a particular disease or condition.

[0141] As used herein, the terms “treat,” “treated,” and “treating” mean both therapeutic treatment and prophylactic or preventative measures wherein the object is to prevent or slow down (lessen) an undesired physiological condition, disorder, or disease, or obtain beneficial or desired clinical results. Beneficial or desired clinical results include, but are not limited to, alleviation of symptoms; diminishment of the extent of a condition, disorder, or disease; stabilized (i.e., not worsening) state of condition, disorder, or disease; delay in onset or slowing of condition, disorder, or disease progression; amelioration of the condition, disorder, or disease state or remission (whether partial or total), whether detectable or undetectable; an amelioration of at least one measurable physical parameter, not necessarily discernible by the patient; or enhancement or improvement of condition, disorder, or disease. Treatment includes eliciting a clinically significant response without excessive levels of side effects. Treatment also includes prolonging survival as compared to expected survival if not receiving treatment.

[0142] As used herein, the terms “variant” and “derivative” are used interchangeably and refer to naturally-occurring, synthetic, and semi-synthetic analogues of a compound, peptide, protein, or other substance described herein. A variant or derivative of a compound, peptide, protein, or other substance described herein can retain or improve upon the biological activity of the original material.

[0143] The details of one or more aspects are set forth in the description below. Other features, objects, and advantages will be apparent from the description and from the claims.

### BRIEF DESCRIPTION OF DRAWINGS

[0144] FIG. 1 is a distribution plot showing the somatic expansion of the human HTT transgene in the striatum as measured by the instability index in R6/2 mice at 4, 8, 12, and 16 weeks of age (4 male and 4 female per age group). The bars are mean values and error bars indicate standard deviation.

[0145] FIG. 2 is a distribution plot showing the somatic expansion of the human HTT transgene in the cerebellum as measured by the instability index in R6/2 mice at 4, 8, 12, and 16 weeks of age (4 male and 4 female per age group).

### DETAILED DESCRIPTION

[0146] The present inventors have found that inhibition, reduction, or depletion of MLH1 level and/or activity in a cell is effective in the treatment of a trinucleotide repeat expansion disorder. Accordingly, useful compositions and methods to treat trinucleotide repeat expansion disorders, e.g., in a subject in need thereof are provided herein.

### 1. Trinucleotide Repeat Expansion Disorders

[0147] Trinucleotide repeat expansion disorders are a family of genetic disorders characterized by the pathogenic expansion of a repeat region within a genomic region. In such disorders, the number of repeats exceeds that of a gene's normal, stable threshold, expanding into a diseased range.

[0148] Trinucleotide repeat expansion disorders generally can be categorized as “polyglutamine” or “non-polyglutamine.” Polyglutamine disorders, including Huntington's disease (HD) and several spinocerebellar ataxias, are caused by a CAG (glutamine) repeats in the protein-coding regions of specific genes. Non-polyglutamine disorders are more heterogeneous and can be caused by CAG trinucleotide repeat expansions in non-coding regions, as in Myotonic dystrophy, or by the expansion of trinucleotide repeats other than CAG that can be in coding or non-coding regions such as the CGG repeat expansion responsible for Fragile X Syndrome.

[0149] Trinucleotide repeat expansion disorders are dynamic in the sense that the number of repeats can vary from generation-to-generation, or even from cell-to-cell in the same individual. Repeat expansion is believed to be caused by polymerase “slipping” during DNA replication. Tandem repeats in the DNA sequence can “loop out” while maintaining complementary base pairing between the parent strand and daughter strands. If the loop structure is formed from the daughter strand, the number of repeats will increase.

[0150] Conversely, if the loop structure is formed from the parent strand, the number of repeats will decrease. It appears that expansion is more common than reduction. In general, the length of repeat expansion is negatively correlated with prognosis; longer repeats are correlated with an earlier age of onset and worsened disease severity. Thus, trinucleotide repeat expansion disorders are subject to “anticipation,” meaning the severity of symptoms and/or age of onset worsen through successive generations of affected families due to the expansion of these repeats from one generation to the next.

[0151] Trinucleotide repeat expansion disorders are well known in the art. Exemplary trinucleotide repeat expansion disorders and the nucleotide repeats of the genes commonly associated with them are included in Table 1.

TABLE 1
Exemplary Trinucleotide Repeat Expansion Disorders

| | | Nucleotide |
|---|---|---|
| Disease | Gene | Repeat |
| ARX-nonsyndromic X-linked mental | ARX | GCG |
| retardation (XLMR) | | |
| Baratela-Scott Syndrome | XYLT1 | GGC |
| Blepharophimosis/Ptosis/Epicanthus | FOXL2 | GCG |
| inversus syndrome type II | | |
| Cleidocranial dysplasia (CCD) | RUNX2 | GCG |
| Congenital central hypoventilation | PHOX-2B | GCG |
| Congenital central hypoventilation | PHOX2B | GCG |
| syndrome (CCHS) | | |
| Creutzfeldt-Jakob disease | PRNP | |
| Dentatorubral-pallidoluysian atrophy | ATN1 | CAG |
| (DRPLA)/Haw River syndrome | | |
| Early infantile epileptic encephalopathy | ARX | GCG |
| (Ohtahara syndrome) | | |
| FRA2A syndrome | AFF3 | CGC |
| FRA7A syndrome | ZNF713 | CGG |
| Fragile X mental retardation (FRAX-E) | AFF2/FMR2 | GCC |
| Fragile X Syndrome (FXS) | FMR1 | CGG |
| Fragile X-associated Primary Ovarian | FMR1 | CGG |
| Insufficiency (FXPOI) | | |
| Fragile X-associated Tremor Ataxia | FMR1 | CGG |
| Syndrome (FXTAS) | | |
| Friedreich ataxia (FRDA) | FXN | GAA |
| Fuchs' Corneal Endothelial Dystrophy | TCF4 | CTG |
| (FECD) | | |
| Hand-foot genital syndrome (HFGS) | HOXA13 | GCG |
| Holoprosencephaly disorder (HPE) | ZIC2 | GCG |
| Huntington disease-like 2 (HDL2) | JPH3 | CTG |
| Huntington's Disease (HD) | HTT | CAG |
| Infantile spasm syndrome/West | ARX | GCG |
| syndrome (ISS) | | |
| Jacobsen syndrome | | |
| KCNN3-associated (e.g., schizophrenia) | KCNN3 | CAG |
| Multiple Skeletal dysplasias | COMP | GAC |
| Myotonic Dystrophy type 1 (DM1) | DMPK | CTG |
| Myotonic Dystrophy type 2 (DM2) | CNBP | CCTG |
| NCOA3-associated (e.g., increased risk | NCOA3 | CAG |
| of prostate cancer) | | |
| Neuronal intranuclear inclusion disease | NOTCH2NLC | GGC |
| (NIID) | | |
| Oculopharyngeal Muscular Dystrophy | PABPN1 | GCG |
| (OPMD) | | |
| Spastic ataxia - Charlevoix-Saguenay | | |
| Spinal Muscular Bulbar Atrophy (SMBA) | AR | CAG |
| Spinocerebellar ataxia type 1 (SCA1) | ATXN1 | CAG |
| Spinocerebellar ataxia type 10 (SCA10) | ATXN10 | ATTCT |
| Spinocerebellar ataxia type 12 (SCA12) | PPP2R2B | CAG |
| Spinocerebellar ataxia type 17 (SCA17) | TBP/ATXN17 | CAG |
| Spinocerebellar ataxia type 2 (SCA2) | ATXN2 | CAG |
| Spinocerebellar ataxia type 3 (SCA3)/ | ATXN3 | CAG |
| Machado-Joseph Disease | | |
| Spinocerebellar ataxia type 45 (SCA45) | FAT2 | CAG |
| Spinocerebellar ataxia type 6 (SCA6) | CACNA1A | CAG |
| Spinocerebellar ataxia type 7 (SCA7) | ATXN7 | CAG |
| Spinocerebellar ataxia type 8 (SCA8) | ATXN8 | CTG |
| Syndromic neurodevelopmental | MAB21L1 | CAG |
| disorder with cerebellar, ocular, | | |
| craniofacial, and genital features (COFG | | |
| syndrome) | | |
| Synpolydactyly (SPD I) | HOXD13 | GCG |
| Synpolydactyly (SPD II) | HOXD12 | GCG |

[0152] The proteins associated with trinucleotide repeat expansion disorders are typically selected based on an experimental association of the protein associated with a trinucleotide repeat expansion disorder to a trinucleotide repeat expansion disorder. For example, the production rate or circulating concentration of a protein associated with a trinucleotide repeat expansion disorder can be elevated or depressed in a population having a trinucleotide repeat expansion disorder relative to a population lacking the trinucleotide repeat expansion disorder. Differences in protein levels can be assessed using proteomic techniques including but not limited to Western blot, immunohistochemical staining, enzyme linked immunosorbent assay (ELISA), and mass spectrometry. Alternatively, the proteins associated with trinucleotide repeat expansion disorders can be identified by obtaining gene expression profiles of the genes encoding the proteins using genomic techniques including, but not limited to, DNA microarray analysis, serial analysis of gene expression (SAGE), and quantitative real-time polymerase chain reaction (qPCR).

### II. Evidence for the Involvement of Mismatch Repair Pathway in Trinucleotide Repeat Expansion

[0153] There is growing evidence that DNA repair pathways, particularly mismatch repair (MMR), are involved in the expansion of trinucleotide repeats (Liu & Wilson (2012) Trends Biochem Sci. 37: 162-172). A recent genome-wide association (GWA) analysis led to the identification of loci harboring genetic variations that alter the age at neurological onset of Huntington's disease (HD) (GEM-HD Consortium, Cell. 2015 Jul. 30; 162(3):516-26). The study identified MLH1, the human homolog of the E. coli DNA mismatch repair gene mutL. A subsequent GWA study in polyglutamine disease patients found significant association of age at onset when grouping all polyglutamine diseases (HD and SCAs) with DNA repair genes as a group, as well as significant associations for specific SNPs in FAN1 and PMS2 with the diseases (Bettencourt et al., (2016) Ann. Neurol., 79: 983-990). These results were consistent with those from an earlier study comparing differences in repeat expansion in two different mouse models of Huntington's Disease, which identified Mlh1 and Mlh3 as novel critical modifiers of CAG instability (Pinto et al., (2013) Mismatch Repair Genes Mlh1 and MIh3 Modify CAG Instability in Huntington's Disease Mice: Genome-Wide and Candidate Approaches. PLoS Genet 9(10): e1003930). Likewise, mice lacking MSH2 or MSH3 have attenuated expansion in the human HD gene (Manley et al., (1999) Nat. Genet. 23, 471-473), the human myotonic dystrophy 1 protein kinase transgene (van den Broek et al. (2002) Hum. Mol. Genet. 11, 191-198), the FAX gene in Friedreich's ataxia (FRDA) (Bourn et al. (2012) PLoS One 7, e47085) and the fragile mental retardation gene in fragile X syndrome (FXS) (Lokanga et al., (2012) Hum. Mutat. 35, 129-136). Another member of the mismatch repair pathway, 8-oxo-guanine glycosylase (OGG1) has also been implicated in expansion, as somatic expansion was found to be reduced in transgenic mice lacking OGG1 (Kovtun I. V. et al. (2007) Nature 447, 447-452). However, another study found that human subjects containing a Ser326Cys polymorphism in hOGG1, which results in reduced OGG1 activity, results in increased mutant huntingtin (Coppede et al., (2009) Toxicol., 278: 199-203). Likewise, complete inactivation of Fan1, another component of the DNA repair pathway, in a mouse HD model produces somatic CAG expansions (Long et al. (2018) J. Hum Genet., 103: 1-9). MLH1, another component of the mismatch repair pathway, has been reported to be linked somatic expansion: polymorphisms in MLH1 was associated with somatic instability of the expanded CTG trinucleotide repeat in myotonic dystrophy type 1 (DM1) patients (Morales et al., (2016) DNA Repair 40: 57-66). Furthermore, natural polymorphisms in MLH1 and Mlh1 have been revealed as mediators of mouse strain specific differences in CTG⋅CAG repeat instability (Pinto et al. (2013) ibid; Tome et al., (2013) PLoS Genet. 9 el 003280). Further evidence of Msh2 and MLH1's involvement in expansion repeats was reported in a study in which short hairpin RNA (shRNA) knockdown of either MSH2 or MLH1 slowed, and ectopic expression of either MSH2 or MLH1 induced GAA trinucleotide repeat expansion of the Friedreich Ataxia (FRDA) gene in fibroblasts derived from FRDA patients (Halabi et al., (2012) J. Biol. Chem. 287, 29958-29967). In spite of some inconsistent results provided above, there is strong evidence that the MMR pathway plays some role in the expansion of trinucleotide repeats in various disorders. Moreover, they are the first to recognize that the inhibition of the MMR pathway provides for the treatment or prevention of these repeat expansion disorders; however, no therapy is currently available or in development which modulates MMR for purposes of treating or preventing these repeat expansion disorders.

### III. Agents

[0154] Agents described herein that reduce the level and/or activity of MLH1 in a cell can be, for example, a polynucleotide, e.g., an antisense oligonucleotide or a dsRNA. These agents reduce the level of an activity related to MLH1, or a related downstream effect, or reduce the level of MLH1 in a cell or subject.

[0155] A. Antisense Oligonucleotide Agents

[0156] In some aspects, the agent that reduces the level and/or activity of MLH1 is a polynucleotide. In some aspects, the polynucleotide is a single-stranded antisense oligonucleotide, e.g., that acts by way of an RNase H-mediated pathway. Antisense oligonucleotides include DNA and DNA/RNA chimeric molecules, typically about 10 to 30 nucleotides in length, which recognize polynucleotide target sequences or sequence portions through hydrogen bonding interactions with the nucleotide bases of the target sequence (e.g., MLH1). An antisense oligonucleotide molecule can decrease the expression level (e.g., protein level or mRNA level) of MLH1. For example, an antisense oligonucleotide includes oligonucleotides that targets full-length MLH1. In some aspects, the antisense oligonucleotide molecule recruits an RNase H enzyme, leading to target mRNA degradation.

[0157] In some aspects, the antisense oligonucleotide decreases the level and/or activity of a positive regulator of function. In other aspects, the antisense oligonucleotide increases the level and/or activity of an inhibitor of a positive regulator of function. In some aspects, the antisense oligonucleotide increases the level and/or activity of a negative regulator of function.

[0158] In some aspects, the antisense oligonucleotide decreases the level and/or activity or function of MLH1. In some aspects, the antisense oligonucleotide inhibits expression of MLH1. In other aspects, the antisense oligonucleotide increases degradation of MLH1 and/or decreases the stability (i.e., half-life) of MLH1. The antisense oligonucleotide can be chemically synthesized.

[0159] The antisense oligonucleotide includes an oligonucleotide having a region of complementarity (e.g., a contiguous nucleobase region) which is complementary to at least a part of an mRNA formed in the expression of MLH1. The region of complementarity can be about 30 nucleotides or less in length (e.g., about 30, 29, 28, 27, 26, 25, 24, 23, 22, 21, 20, 19, or 18 nucleotides or less in length). Upon contact with a cell expressing the MLH1 gene, the antisense oligonucleotide can inhibit the expression of the MLH1 gene (e.g., a human, a primate, a non-primate, or a bird MLH1 gene) by at least about 10% as assayed by, for example, a PCR or branched DNA (bDNA)-based method, or by a protein-based method, such as by immunofluorescence analysis, using, for example, Western Blotting or flowcytometric techniques.

[0160] Similarly, the region of complementarity to the target sequence can be between 10 and 30 linked nucleosides in length, e.g., 10, 11, 12, 13, 14, 15, 16, 17, 18, 19, 20, 21, 22, 23, 24, 25, 26, 27, 28, 29, or 30 or between 10-29, 10-28, 10-27, 10-26, 10-25, 10-24, 10-23, 10-22, 10-21, 10-20, 10-19, 10-18, 10-17, 10-16, 10-15, 10-14, 10-13, 10-12, 15-29, 15-28, 15-27, 15-26, 15-25, 15-24, 15-23, 15-22, 15-21, 15-20, 15-19, 15-18, 15-17, 18-30, 18-29, 18-28, 18-27, 18-26, 18-25, 18-24, 18-23, 18-22, 18-21, 18-20, 19-30, 19-29, 19-28, 19-27, 19-26, 19-25, 19-24, 19-23, 19-22, 19-21, 19-20, 20-30, 20-29, 20-28, 20-27, 20-26, 20-25, 20-24, 20-23, 20-22, 20-21, 21-30, 21-29, 21-28, 21-27, 21-26, 21-25, 21-24, 21-23, or 21-22 linked nucleosides in length. Ranges and lengths intermediate to the above recited ranges and lengths are also contemplated.

[0161] An antisense oligonucleotide can be synthesized by standard methods known in the art as further discussed below, e.g., by use of an automated DNA synthesizer, such as are commercially available from, for example, Biosearch, Applied Biosystems, Inc.

[0162] The antisense oligonucleotide compound can be prepared using solution-phase or solid-phase organic synthesis or both. Organic synthesis offers the advantage that the antisense oligonucleotide comprising unnatural or alternative nucleotides can be easily prepared. Single-stranded antisense oligonucleotides can be prepared using solution-phase or solid-phase organic synthesis or both.

[0163] In one aspect, an antisense oligonucleotide includes a region of at least 10 contiguous nucleobases having at least 80% (e.g., at least 85%, at least 90%, at least 95%, or at least 99%) complementary to at least 10 contiguous nucleotides of a MLH1 gene. In some aspects, the antisense oligonucleotide comprises a sequence complementary to at least 17 contiguous nucleotides, 19-23 contiguous nucleotides, 19 contiguous nucleotides, or 20 contiguous nucleotides of a MLH1 gene. The antisense oligonucleotide sequence can be selected from the group of sequences provided in any one of SEQ ID NOs: 6-1393.

[0164] In one aspect, the sequence is substantially complementary to a sequence of an mRNA generated in the expression of MLH1. In some aspects, the region of at least 10 nucleobases is complementary to an MLH1 gene corresponding to a sequence of reference mRNA NM_000249.3 at is one or more of positions 193-258, 289-607, 629-734, 757-836, 865-1125, 1177-1206, 1218-1286, 1324-1408, 1433-1747, 1759-1814, 1852-1901, 1959-2029, 2053-2240, 2250-2356, 2382-2479, 2510-2546, and 2573-2598 of the MLH1 gene. In some aspects, the region of at least 10 nucleobases is complementary to an MLH1 gene corresponding to a sequence of reference mRNA NM_000249.3 at one or more of positions 193-251, 289-607, 629-734, 757-836, 865-1125, 1177-1206, 1218-286, 1324-1408, 1433-1747, 1759-1814, 1852-1901, 1959-2029, 2053-2240, 2250-2356, 2382-2479, 2510-2546, and 2573-2598 of the MLH1 gene. In some aspects, the region of at least 10 nucleobases is complementary to an MLH1 gene corresponding to a sequence of reference mRNA NM_000249.3 at is one or more of positions 193-251, 289-607, 629-734, 758-836, 865-1125, 1177-1206, 1218-1286, 1324-1408, 1433-1747, 1759-1814, 1852-1901, 1959-2029, 2053-2240, 2250-2356, 2382-2479, 2510-2546, and 2573-2598 of the MLH1 gene. In some aspects, the region of at least 10 nucleobases is complementary to an MLH1 gene corresponding to a sequence of reference mRNA NM_000249.3 at one or more of positions 312-391, 410-508, 522-607, 629-726, 759-1125, 1177-1206, 1221-1286, 1324-1407, 1433-1747, 1764-1814, 1854-1901, 1959-2029, 2053-2113, 2184-2240, 2251-2283, 2303-2351, 2384-2479, 2510-2546 of the MLH1 gene. In some aspects, the region of at least 10 nucleobases is complementary to an MLH1 gene corresponding to a sequence of reference mRNA NM_000249.3 at one or more of positions 575-602, 662-724, 805-830, 891-960, 1002-1027, 1056-1081, 1100-1125, 1342-1384, 1443-1498, 1513-1561, 1600-1625, 1652-1747, 1876-1901, 2001-2026, and 2430-2459 of the MLH1 gene. In some aspects, the region of at least 10 nucleobases is complementary to an MLH1 gene corresponding to a sequence of reference mRNA NM_000249.3 at one or more of positions 307-332, 458-500, 571-602, 758-787, 865-890, 892-917, 1045-1084, 1624-1649, 1786-1813, 1871-1901, 2053-2081, 2086-2114, and 2149-2176 of the MLH1 gene. In some aspects, the region of at least 10 nucleobases is complementary to an MLH1 gene corresponding to a sequence of reference mRNA NM_000249.3 at one or more of positions 575-602, 1056-1081, and 1876-1901 of the MLH1 gene.

[0165] In some aspects, the antisense oligonucleotide comprises the nucleobase sequence of any one of SEQ ID NOs: 6-1393. In some aspects, the antisense oligonucleotide comprises the nucleobase sequence of any one of SEQ ID NOs: 81-84, 86-87, 90, 99-101, 106-107, 111, 113-114, 117, 122-126, 129-131, 137-138, 140, 144, 146-160, 172, 188-191, 211, 215-220, 222-226, 229, 231-239, 242-249, 270-271, 274-279, 286-293, 295-298, 310-320, 322-328, 332-335, 337, 345, 383-388, 397-402, 405-413, 415-421, 458, 473-474, 476-478, 482-487, 490-491, 493-494, 497-501, 522-526, 528-530, 542, 545-549, 551-560, 563-565, 585-586, 596-598, 600-610, 613, 619-622, 631-634, 636-637, 639-643, 645-646, 649-651, 655, 699, 701-709, 714-715, 729-731, 733-741, 744, 749, 752-754, 757, 765-766, 768-769, 788-791, 819, 827-835, 840-842, 845, 847, 850, 852-853, 857, 859, 861, 866-872, 877-882, 884-887, 889-890, 893-894, 901, 923-931, 936-939, 975, 977, 981-986, 1019, 1023-1032, 1034, 1036-1041, 1083-1087, 1089, 1101, 1104-1105, 1107, 1109-1112, 1118-1123, 1131-1134, 1136, 1138-1139, 1140-1144, 1151-1152, 1161-1163, 1187-1192, 1194-1195, 1197, 1199-1201, 1204, 1207, 1209, 1214-1216, 1218, 1220-1223, 1239-1241, 1244, 1247, 1257-1259, 1262-1270, 1273-1275, 1277-1278, 1314-1315, and 1343. In some aspects, the antisense oligonucleotide comprises the nucleobase sequence of any one of SEQ ID NOs: 81-84, 86-87, 99-101, 106, 113-114, 122-126, 129-131, 137-138, 140, 144, 146-159, 172, 188-191, 211, 215-217, 219, 223-226, 229, 232-239, 242-249, 270-271, 274-279, 286-293, 295-298, 310-320, 322-328, 332-335, 337, 345, 384-388, 397-402, 405-421, 458, 473-474, 476-478, 482-487, 490-491, 493-494, 497-501, 522-526, 528-530, 542, 545-549, 551-560, 563-565, 585-586, 596-610, 613, 619-622, 631-634, 636-637, 639-643, 645-646, 649-651, 655, 699-709, 714-715, 729-731, 733-741, 744, 749, 752-754, 757, 765-766, 768-769, 788-791, 819, 827-835, 840-842, 845, 847, 850, 852-853, 857, 859, 861, 866-872, 877-882, 884-887, 889-890, 893-894, 901, 923-931, 936-939, 975, 977, 981-986, 1019, 1023-1032, 1034, 1036-1041, 1083-1087, 1089, 1101, 1104-1105, 1107, 1109-1112, 1118-1123, 1131-1134, 1136, 1138-1144, 1151-1152, 1161-1163, 1187-1191, 1194-1195, 1197, 1199-1201, 1204, 1207, 1209, 1214-1216, 1218, 1220-1223, 1239-1241, 1244, 1247, 1257-1259, 1262-1270, 1273-1275, 1277-1278, 1314-1315, and 1343. In some aspects, the antisense oligonucleotide comprises the nucleobase sequence of any one of SEQ ID NOs: 81-87, 99-101, 106, 113-114, 122-126, 129-131, 137-138, 140, 144, 146, 147, 148-151, 153-159, 172, 188-191, 211215-217, 219, 223-226, 229, 232-239, 242-245, 248-249, 270-271274-276, 278-279, 286-293, 295-298, 310-320, 322-338, 332-335, 337, 345, 384-386, 387-388, 397-402, 405-413, 415-421, 458, 473-474, 476-478, 482-487, 490-491, 493-494, 497-501, 522-526, 528-530, 542, 545-549, 551-560, 563-565, 585-586, 596-598, 600-610, 613, 619-622, 631-634, 636-637, 639-643, 645-646, 649-651, 655, 699, 701-709, 714-715, 729-731, 733-741, 744, 749, 752-754, 757, 765-766, 768-769, 788, 790-791, 819, 827-835, 840-842, 845, 847, 850, 852-853, 857, 859, 861, 866-872, 877-882, 884-887, 889-890, 893-894, 901, 923-931, 936-939, 975, 977, 981-986, 1019, 1023-1032, 1034, 1036-1041, 1083-1087, 1089, 1101, 1104-1105, 1107, 1109-1112, 1118-1123, 1131-1134, 1136, 1138-1144, 1151-1152, 1161-1163, 1187-1191, 1194-1195, 1197, 1199, 1200-1201, 1204, 1207, 1209, 1214-1216, 1218, 1220-1223, 1239-1241, 1244, 1247, 1257-1259, 1262-1270, 1273-1275, 1277-1278, 1314-1315, and 1343. In some aspects, the antisense oligonucleotide comprises the nucleobase sequence of any one of SEQ ID NOs: 122, 123, 125-126, 129-130, 131, 137, 146-147, 153-156, 158, 188-191, 211, 216, 223, 226, 235, 237, 245, 248, 270-271, 276, 278-279, 286, 289-293, 297-298, 310, 312-320, 323-328, 332, 334-335, 337, 385-386, 397-402, 407, 410-412, 415-417, 419-420, 476, 478, 482-487, 490-491, 493-494, 497-501, 522-523, 525-526, 528-530, 546-548, 557, 563-565, 586, 603, 605-610, 613, 619-622, 631-632, 634, 639-641, 645-646, 650-651, 655, 699, 701, 704-709, 714, 729-731, 733-734, 736-740, 744, 749, 752-754, 757, 765-766, 768-769, 788, 790-791, 819, 827-835, 840-842, 847, 850, 859, 861, 866-872, 877-882, 884-887, 889-890, 893-894, 901, 928-931, 936-939, 977, 981-986, 1019, 1024-1026, 1034, 1036-1041, 1083-1085, 1087, 1111, 1132-1134, 1136, 1138-1140, 1142, 1161-1163, 1188-1190, 1194-1195, 1207, 1218, 1241, 1244, 1247, 1257-1259, 1262-1269, 1277-1278, and 1314-1315. In some aspects, the antisense oligonucleotide comprises the nucleobase sequence of any one of SEQ ID NOs: 291-293, 313, 316-317, 325-326, 334-335, 415, 483, 485-486, 499-500, 523, 525, 564, 607, 622, 704-705, 707-709, 739, 752, 768-769, 788, 827, 861, 871-872, 877-879, 882, 885, 886, 901, 986, 1038, 1263, and 1265-1267. In some aspects, the antisense oligonucleotide comprises the nucleobase sequence of any one of SEQ ID NOs: 117, 215-226, 229-232, 287-293, 384-385, 387-388, 458, 484, 596-610, 850, 936-938, 981-986, 1083-1086, 1109-1112, and 1121-1123.

[0166] In some aspects, the nucleobase sequence of the antisense oligonucleotide consists of any one of SEQ ID NOs: 6-1393. In some aspects, the antisense oligonucleotide consists of the nucleobase sequence of any one of SEQ ID NOs: 81-87, 90, 99-101, 106-107, 111, 113-114, 117, 122-126, 129-131, 137-138, 140, 144, 146-160, 172, 188-191, 211, 215-220, 22-226, 229, 231-239, 242-249, 270-271, 274-279, 286-293, 295-297, 298, 310-320, 322-328, 332-335, 337, 345, 383-388, 397-402, 405-413, 415-421, 458, 473-474, 476-478, 482-487, 490-491, 493-494, 497-501, 522-526, 528-530, 542, 545-549, 551-560, 563-565, 585-586, 596-598, 600-610, 613, 619-622, 631-634, 636-637, 639-643, 645-646, 649-651, 655, 699, 701-709, 714-715, 729-731, 733-741, 744, 749, 752-754, 757, 765-766, 768-769, 788, 790-791, 819, 827-835, 840-842, 845, 847, 850, 852-853, 857, 859, 861, 866-872, 877-882, 884-887, 889-890, 893-894, 901, 923-931, 936-939, 975, 977, 981-986, 1019, 1023-1032, 1034, 1036-1041, 1083-1087, 1089, 1101, 1104-1105, 1107, 1109-1112, 118-1123, 1131-1134, 1136, 1138-1144, 1151-1152, 1161-1163, 1187-1192, 1194-1195, 1197, 1199-1201, 1204, 1207, 1209, 1214-1216, 1218, 1220-1222, 1223, 1239-1241, 1244, 1247, 1257-1259, 1262-1270, 1273-1275, 1277-1278, 1314-1315, and 1343. In some aspects, the antisense oligonucleotide consists of the nucleobase sequence of any one of SEQ ID NOs: 81-84, 86-87, 99-101, 106, 113-114, 122-126, 129-131, 137-138, 140, 144, 146-159, 172, 188-191, 211, 215-217, 219, 223-226, 229, 232-239, 242-249, 270-271, 274-279, 286-293, 295-298, 310-320, 322-328, 332-335, 337, 345, 384-388, 397-402, 405-413, 415-421, 458, 473-474, 476-478, 482-487, 490-491, 493-494, 497-501, 522-526, 528-530, 542, 545-549, 551-560, 563-565, 585-586, 596-598, 600-610, 613, 619-622, 631-634, 636-637, 639-643, 645-646, 649-651, 655, 699, 701-709, 714-715, 729-731, 733-741, 744, 749, 752-754, 757, 765-766, 768-769, 788, 790-791, 819, 827-835, 840-842, 845, 847, 850, 852-853, 857, 859, 861, 866-872, 877-882, 884-887, 889-890, 893-894, 901, 923-931, 936-939, 975, 977, 981-986, 1019, 1023-1032, 1034, 1036-1041, 1083-1087, 1089, 1101, 1104-1105, 1107, 1109-1112, 1118-1123, 1131-1134, 1136, 1138-1144, 1151-1152, 1161-1163, 1187-1191, 1194-1195, 1197, 1199-1201, 1204, 1207, 1209, 1214-1216, 1218, 1220-1223, 1239-1241, 1244, 1247, 1257-1259, 1262-1270, 1273-1275, 1277-1278, 1314-1315, and 1343. In some aspects, the antisense oligonucleotide consists of the nucleobase sequence of any one of SEQ ID NOs: 81-84, 86-87, 99-101, 106, 113-114, 122-126, 129-131, 137-138, 140, 144, 146-151, 153-159, 172, 188-191, 211, 215-217, 219223-226, 229, 232-239, 242-245, 248-249, 270-271, 274-276, 278-279, 286-293, 295-298, 310-320, 322-328, 332-335, 337, 345, 384-388, 397-402, 405-413, 415-421, 458, 473-474, 476-478, 482-487, 490-491, 493-494, 497-501, 522-525, 526, 528-530, 542, 545-549, 551-560, 563-565, 585-586, 596-598, 600-610, 613, 619-622, 631-634, 636-637, 639-643, 645-646, 649-651, 655, 699, 701-709, 714-715, 729-731, 733-741, 744, 749, 752-754, 757, 765-766, 768-769, 788, 790-791, 819, 827-835, 840-842, 845, 847, 850, 852-853, 857, 859, 861, 866-872, 877-882, 884-887, 889-890, 893-894, 901, 923-931, 936-939, 975, 977, 981-986, 1019, 1023-1032, 1034, 1036-1041, 1083-1087, 1089, 1101, 1104-1105, 1107, 1109-1112, 1118-1123, 1131-1134, 1136, 1138-1144, 1151-1152, 1161-1163, 1187-1191, 1194-1195, 1197, 1199-1201, 1204, 1207, 1209, 1214-1216, 1218, 1220-1223, 1239-1241, 1244, 1247, 1257-1259, 1262-1270, 1273-1275, 1277-1278, 1314-1315, and 1343. In some aspects, the antisense oligonucleotide consists of the nucleobase sequence of any one of SEQ ID NOs: 122-123, 125-126, 129-131, 137, 146-147, 153-156, 158, 188-191, 211, 216, 223, 226, 235, 237, 245, 248, 270-271, 276, 278-279, 286, 289-293, 297-298, 310, 312-320, 323-328, 332, 334-335, 337, 385-386, 397-402, 407, 410-412, 415-417, 419-420, 476, 478, 482-487, 490-491, 493-494, 497-501, 522-523, 525-526, 528-530, 546-548, 557, 563-565, 586, 603, 605-610, 613, 619-622, 631-632, 634, 639-641, 645-646, 650-651, 655, 699, 701, 704-709, 714, 729-731, 733-734, 736-740, 744, 749, 752-754, 757, 765-766, 768-769, 788, 790-791, 819, 827-835, 840-842, 847, 850, 859, 861, 866-867, 868-872, 877-882, 884-887, 889-890, 893-894, 901, 928-931, 936-939, 977, 981-986, 1019, 1024-1026, 1034, 1036-1041, 1083-1085, 1087, 1111, 1132-1134, 1136, 1138-1140, 1142, 1161-1163, 1188-1190, 1194-1195, 1207, 1218, 1241, 1244, 1247, 1257-1259, 1262-1269, 1277-1278, and 1314-1315. In some aspects, wherein the antisense oligonucleotide consists of the nucleobase sequence of any one of SEQ ID NOs: 291-293, 313, 316-317, 325-326, 334-335, 415, 483, 485-486, 499-500, 523, 525, 564, 607, 622, 704-705, 707-709, 739, 752, 768-769, 788, 827, 861, 871-872, 877-879, 882, 885, 886, 901, 986, 1038, 1263, and 1265-1267. In some aspects, wherein the antisense oligonucleotide consists of the nucleobase sequence of any one of SEQ ID NOs: 117, 215-226, 229-232, 287-293, 384-385, 387-388, 458-484, 596-610, 850, 936-938, 981-986, 1083-1086, 1109-1112 and 1121-1123.

[0167] In some aspects, the antisense oligonucleotide exhibits at least 50% mRNA inhibition at 20 nM antisense oligonucleotide concentration when determined using a cell assay when compared with a control cell. In some aspects, the antisense oligonucleotide exhibits at least 60% mRNA inhibition at a 20 nM antisense oligonucleotide concentration when determined using a cell assay when compared with a control cell. In some aspects, the antisense oligonucleotide exhibits at least 70% mRNA inhibition at a 20 nM antisense oligonucleotide concentration when determined using a cell assay when compared with a control cell. In some aspects, the antisense oligonucleotide exhibits at least 85% mRNA inhibition at a 20 nM antisense oligonucleotide concentration when determined using a cell assay when compared with a control cell. In some aspects, the antisense oligonucleotide exhibits at least 50% mRNA inhibition at 2 nM antisense oligonucleotide concentration when determined using a cell assay when compared with a control cell. In some aspects, the antisense oligonucleotide exhibits at least 60% mRNA inhibition at a 2 nM antisense oligonucleotide concentration when determined using a cell assay when compared with a control cell. In some aspects, the antisense oligonucleotide exhibits at least 70% mRNA inhibition at a 20 nM antisense oligonucleotide concentration when determined using a cell assay when compared with a control cell. In some aspects, the antisense oligonucleotide exhibits at least 85% mRNA inhibition at a 20 nM antisense oligonucleotide concentration when determined using a cell assay when compared with a control cell.

[0168] The cell assay can comprise transfecting mammalian cells, such as HEK293, NIH3T3, or HeLa cells, with the desired concentration of oligonucleotide (e.g., 2 nM or 20 nM) using Lipofectamine 2000 (Invitrogen) and comparing MLH1 mRNA levels of transfected cells to MLH1 levels of control cells. Control cells can be transfected with oligonucleotides not specific to MLH1 or mock transfected. mRNA levels can be determined using RT-qPCR and MLH1 mRNA levels can be normalized to GAPDH mRNA levels. The percent inhibition can be calculated as the percent of MLH1 mRNA concentration relative to the MLH1 concentration of the control cells.

[0169] In some aspects, the antisense oligonucleotide, or contiguous nucleotide region thereof, has a gapmer design or structure also referred herein merely as “gapmer.” In a gapmer structure the antisense oligonucleotide comprises at least three distinct structural regions a 5′-flanking sequence (also known as a 5′-wing), a DNA core sequence (also known as a gap) and a 3′-flanking sequence (also known as a 3′-wing), in ‘5->3’ orientation. In this design, the 5′ and 3′ flanking sequences comprise at least one alternative nucleoside which is adjacent to a DNA core sequence, and can in some aspects, comprise a contiguous stretch of 2-7 alternative nucleosides, or a contiguous stretch of alternative and DNA nucleosides (mixed flanking sequences comprising both alternative and DNA nucleosides). The length of the 5′-flanking sequence region can be at least two nucleosides in length (e.g., at least at least 2, at least 3, at least 4, at least 5, or more nucleosides in length). The length of the 3′-flanking sequence region can be at least two nucleosides in length (e.g., at least 2, at least 3, at least at least 4, at least 5, or more nucleosides in length). The 5′ and 3′ flanking sequences can be symmetrical or asymmetrical with respect to the number of nucleosides they comprise. In some aspects, the DNA core sequence comprises about 10 nucleosides flanked by a 5′ and a 3′ flanking sequence each comprising about 5 nucleosides, also referred to as a 5-10-5 gapmer.

[0170] Consequently, the nucleosides of the 5′ flanking sequence and the 3′ flanking sequence which are adjacent to the DNA core sequence are alternative nucleosides, such as 2′ alternative nucleosides. The DNA core sequence comprises a contiguous stretch of nucleotides which are capable of recruiting RNase H, when the oligonucleotide is in duplex with the MLH1 target nucleic acid. In some aspects, the DNA core sequence comprises a contiguous stretch of 5-16 DNA nucleosides. In other aspects, the DNA core sequence comprises a region of at least 10 contiguous nucleobases having at least 80% (e.g., at least 85%, at least 90%, at least 95%, or at least 99%) complementarity to an MLH1 gene. In some aspects, the gapmer comprises a region complementary to at least 17 contiguous nucleotides, 19-23 contiguous nucleotides, or 19 contiguous nucleotides of an MLH1 gene. The gapmer is complementary to the MLH1 target nucleic acid, and can therefore be the contiguous nucleoside region of the oligonucleotide.

[0171] The 5′ and 3′ flanking sequences, flanking the 5′ and 3′ ends of the DNA core sequence, can comprise one or more affinity enhancing alternative nucleosides. In some aspects, the 5′ and/or 3′ flanking sequence comprises at least one 2′-O-methoxyethyl (MOE) nucleoside. In some aspects, the 5′ and/or 3′ flanking sequences, contain at least two MOE nucleosides. In some aspects, the 5′ flanking sequence comprises at least one MOE nucleoside. In some aspects both the 5′ and 3′ flanking sequence comprise a MOE nucleoside. In some aspects, all the nucleosides in the flanking sequences are MOE nucleosides. In other aspects, the flanking sequence can comprise both MOE nucleosides and other nucleosides (mixed flanking sequence), such as DNA nucleosides and/or non-MOE alternative nucleosides, such as bicyclic nucleosides (BNAs) (e.g., LNA nucleosides or cET nucleosides), or other 2′ substituted nucleosides. In this case the DNA core sequence is defined as a contiguous sequence of at least 5 RNase H recruiting nucleosides (such as 5-16 DNA nucleosides) flanked at the 5′ and 3′ end by an affinity enhancing alternative nucleoside, such as an MOE nucleoside.

[0172] In other aspects, the 5′ and/or 3′ flanking sequence comprises at least one BNA (e.g., at least one LNA nucleoside or cET nucleoside). In some aspects, 5′ and/or 3′ flanking sequence comprises at least 2 bicyclic nucleosides. In some aspects, the 5′ flanking sequence comprises at least one BNA. In some aspects both the 5′ and 3′ flanking sequence comprise a BNA. In some aspects, all the nucleosides in the flanking sequences are BNAs. In other aspects, the flanking sequence can comprise both BNAs and other nucleosides (mixed flanking sequences), such as DNA nucleosides and/or non-BNA alternative nucleosides, such as 2′ substituted nucleosides. In this case, the DNA core sequence is defined as a contiguous sequence of at least five RNase H recruiting nucleosides (such as 5-16 DNA nucleosides) flanked at the 5′ and 3′ end by an affinity enhancing alternative nucleoside, such as a BNA, such as an LNA, such as beta-D-oxy-LNA.

[0173] The 5′ flank attached to the 5′ end of the DNA core sequence comprises, contains, or consists of at least one alternative sugar moiety (e.g., at least three, at least four, at least five, at least six, at least seven, or more alternative sugar moieties). In some aspects the flanking sequence comprises or consists of from 1 to 7 alternative nucleobases, such as from 2 to 6 alternative nucleobases, such as from 2 to 5 alternative nucleobases, such as from 2 to 4 alternative nucleobases, such as from 1 to 3 alternative nucleobases, such as one, two, three or four alternative nucleobases. In some aspects, the flanking sequence comprises or consists of at least one alternative internucleoside linkage (e.g., at least three, at least four, at least five, at least six, at least seven, or more alternative internucleoside linkages).

[0174] The 3′ flank attached to the 3′ end of the DNA core sequence comprises, contains, or consists of at least one alternative sugar moiety (e.g., at least three, at least four, at least five, at least six, at least seven, or more alternative sugar moieties). In some aspects the flanking sequence comprises or consists of from 1 to 7 alternative nucleobases, such as from 2 to 6 alternative nucleobases, such as from 2 to 5 alternative nucleobases, such as from 2 to 4 alternative nucleobases, such as from 1 to 3 alternative nucleobases, such as one, two, three, or four alternative nucleobases. In some aspects, the flanking sequence comprises or consists of at least one alternative internucleoside linkage (e.g., at least three, at least four, at least five, at least six, at least seven, or more alternative internucleoside linkages).

[0175] In an aspect, one or more or all of the alternative sugar moieties in the flanking sequence are 2′ alternative sugar moieties.

[0176] In a further aspect, one or more of the 2′ alternative sugar moieties in the wing regions are selected from 2′-O-alkyl-sugar moieties, 2′-O-methyl-sugar moieties, 2′-amino-sugar moieties, 2′-fluoro-sugar moieties, 2′-alkoxy-sugar moieties, MOE sugar moieties, LNA sugar moieties, arabino nucleic acid (ANA) sugar moieties, and 2′-fluoro-ANA sugar moieties.

[0177] In one aspect all the alternative nucleosides in the flanking sequences are bicyclic nucleosides. In a further aspect, the bicyclic nucleosides in the flanking sequences are independently selected from the group consisting of oxy-LNA, thio-LNA, amino-LNA, cET, and/or ENA, in either the beta-D or alpha-L configurations or combinations thereof.

[0178] In some aspects, the one or more alternative internucleoside linkages in the flanking sequences are phosphorothioate internucleoside linkages. In some aspects, the phosphorothioate linkages are stereochemically pure phosphorothioate linkages. In some aspects the phosphorothioate linkages are Sp phosphorothioate linkages. In other aspects, the phosphorothioate linkages are Rp phosphorothioate linkages. In some aspects, the alternative internucleoside linkages are 2′-alkoxy internucleoside linkages. In other aspects, the alternative internucleoside linkages are alkyl phosphate internucleoside linkages.

[0179] The DNA core sequence can comprise, contain, or consist of at least 5-16 consecutive DNA nucleosides capable of recruiting RNase H. In some aspects, all of the nucleosides of the DNA core sequence are DNA units. In further aspects the DNA core region can consist of a mixture of DNA and other nucleosides capable of mediating RNase H cleavage. In some aspects, at least 50% of the nucleosides of the DNA core sequence are DNA, such as at least 60%, at least 70% or at least 80%, or at least 90% DNA. In some aspects, all of the nucleosides of the DNA core sequence are RNA units.

[0180] The antisense oligonucleotide can comprise a contiguous region which is complementary to the target nucleic acid. In some aspects, the antisense oligonucleotide can further comprise additional linked nucleosides positioned 5′ and/or 3′ to either the 5′ and 3′ flanking sequences. These additional linked nucleosides can be attached to the 5′ end of the 5′ flanking sequence or the 3′ end of the 3′ flanking sequence, respectively. The additional nucleosides can, in some aspects, form part of the contiguous sequence which is complementary to the target nucleic acid, or in other aspects, can be non-complementary to the target nucleic acid.

[0181] The inclusion of the additional nucleosides at either, or both of the 5′ and 3′ flanking sequences can independently comprise one, two, three, four, or five additional nucleotides, which can be complementary or non-complementary to the target nucleic acid. In this respect the antisense oligonucleotide, can in some aspects, comprise a contiguous sequence capable of modulating the target which is flanked at the 5′ and/or 3′ end by additional nucleotides. Such additional nucleosides can serve as a nuclease susceptible biocleavable linker, and can therefore be used to attach a functional group such as a conjugate moiety to the antisense oligonucleotide. In some aspects the additional 5′ and/or 3′ end nucleosides are linked with phosphodiester linkages, and can be DNA or RNA. In another aspect, the additional 5′ and/or 3′ end nucleosides are alternative nucleosides which can for example be included to enhance nuclease stability or for ease of synthesis.

[0182] In other aspects, the antisense oligonucleotides can utilize “altimer” design and comprise alternating 2′-fluoro-ANA and DNA regions that are alternated every three nucleosides. Altimer oligonucleotides are discussed in more detail in Min, et al., Bioorganic & Medicinal Chemistry Letters, 2002, 12(18): 2651-2654 and Kalota, et al., Nuc. Acid Res. 2006, 34(2): 451-61 (herein incorporated by reference).

[0183] In other aspects, the antisense oligonucleotides can utilize “hemimer” design and comprise a single 2′-modified flanking sequence adjacent to (on either side of the 5′ or the 3′ side of) a DNA core sequence. Hemimer oligonucleotides are discussed in more detail in Geary et al., 2001, J. Pharm. Exp. Therap., 296: 898-904 (herein incorporated by reference).

[0184] In some aspects, an antisense oligonucleotide has a nucleic acid sequence with at least 50% (e.g., at least 50%, at least 60%, at least 70%, at least 80%, at least 85%, at least 90%, at least 95%, at least 96%, at least 97%, at least 98%, at least 99%, or 100%) sequence identity to the nucleic acid sequence any one of SEQ ID NOs: 6-1393. In some aspects, an antisense oligonucleotide has a nucleic acid sequence with at least 85% sequence identity to the nucleic acid sequence of any one of SEQ ID NOs: 6-1393.

[0185] It will be understood that, although the sequences in SEQ ID NOs: 6-1393 are described as unmodified and/or un-conjugated sequences, the nucleosides of the antisense oligonucleotide can comprise any one of the sequences set forth in any one of SEQ ID NOs: 6-1393 that is an alternative nucleoside and/or conjugated as described in detail below.

[0186] The skilled person is well aware that antisense oligonucleotides having a structure of between about 18-20 base pairs can be particularly effective in inducing RNase H-mediated degradation. However, one can appreciate that shorter or longer antisense oligonucleotides can be effective. In the aspects described above, by virtue of the nature of the antisense oligonucleotide sequences provided herein, antisense oligonucleotides described herein can include shorter or longer antisense oligonucleotide sequences. It can be reasonably expected that shorter antisense oligonucleotides minus only a few linked nucleosides on one or both ends can be similarly effective as compared to the antisense oligonucleotides described above. Hence, antisense oligonucleotides having a sequence of at least 8, 9, 10, 11, 12, 13, 14, 15, 16, 17, 18, 19, 20, or more contiguous linked nucleosides derived from one of the sequences provided herein, and differing in their ability to inhibit the expression of MLH1 by not more than about 5, 10, 15, 20, 25, or 30% inhibition from an antisense oligonucleotide comprising the full sequence, are contemplated.

[0187] The antisense oligonucleotides described herein can function via nuclease mediated degradation of the target nucleic acid, where the antisense oligonucleotides are capable of recruiting a nuclease, such as an endonuclease like endoribonuclease (RNase) (e.g., RNase H). Examples of antisense oligonucleotide designs which operate via nuclease mediated mechanisms are antisense oligonucleotides which typically comprise a region of at least 5 or 6 DNA nucleosides and are flanked on one side or both sides by affinity enhancing alternative nucleosides, for example gapmers, headmers, and tailmers.

[0188] The RNase H activity of an antisense oligonucleotide refers to its ability to recruit RNase H when in a duplex with a complementary RNA molecule. WO01/23613 provides in vitro methods for determining RNase H activity, which can be used to determine the ability to recruit RNase H. Typically an antisense oligonucleotide is deemed capable of recruiting RNase H if it, when provided with a complementary target nucleic acid sequence, has an initial rate, as measured in pmol/l/min, of at least 5%, such as at least 10% or more than 20% of the of the initial rate determined when using an antisense oligonucleotide having the same base sequence as the modified oligonucleotide being tested, but containing only DNA monomers, with phosphorothioate linkages between all monomers in the antisense oligonucleotide, and using the methodology provided by Example 91-95 of WO01/23613 (hereby incorporated by reference).

[0189] Furthermore, the antisense oligonucleotides described herein identify a site(s) in a MLH1 transcript that is susceptible to RNase H-mediated cleavage. As used herein, an antisense oligonucleotide is said to target within a particular site of an RNA transcript if the antisense oligonucleotide promotes cleavage of the transcript anywhere within that particular site. Such an antisense oligonucleotide will generally include at least about 5-10 contiguous linked nucleosides from one of the sequences provided herein coupled to additional linked nucleoside sequences taken from the region contiguous to the selected sequence in a MLH1 gene.

[0190] Inhibitory antisense oligonucleotides can be designed by methods well known in the art. While a target sequence is generally about 10-30 linked nucleosides in length, there is wide variation in the suitability of particular sequences in this range for directing cleavage of any given target RNA.

[0191] Antisense oligonucleotides with homology sufficient to provide sequence specificity required to uniquely degrade any RNA can be designed using programs known in the art

[0192] Systematic testing of several designed species for optimization of the antisense oligonucleotide sequence can be undertaken in accordance with the teachings provided herein. Considerations when designing antisense oligonucleotides include, but are not limited to, biophysical, thermodynamic, and structural considerations, base preferences at specific positions, and homology. The making and use of inhibitory therapeutic agents based on non-coding antisense oligonucleotides are also known in the art.

[0193] Various software packages and the guidelines set out herein provide guidance for the identification of optimal target sequences for any given gene target, but an empirical approach can be taken in which a “window” or “mask” of a given size (as a non-limiting example, 21 nucleotides) is literally or figuratively (including, e.g., in silico) placed on the target RNA sequence to identify sequences in the size range that can serve as target sequences. By moving the sequence “window” progressively one nucleotide upstream or downstream of an initial target sequence location, the next potential target sequence can be identified, until the complete set of possible sequences is identified for any given target size selected. This process, coupled with systematic synthesis and testing of the identified sequences (using assays as described herein or as known in the art) to identify those sequences that perform optimally can identify those RNA sequences that, when targeted with an antisense oligonucleotide agent, mediate the best inhibition of target gene expression. Thus, while the sequences identified herein represent effective target sequences, it is contemplated that further optimization of inhibition efficiency can be achieved by progressively “walking the window” one nucleotide upstream or downstream of the given sequences to identify sequences with equal or better inhibition characteristics.

[0194] Further, it is contemplated that for any sequence identified herein, further optimization could be achieved by systematically either adding or removing linked nucleosides to generate longer or shorter sequences and testing those sequences generated by walking a window of the longer or shorter size up or down the target RNA from that point. Again, coupling this approach to generating new candidate targets with testing for effectiveness of antisense oligonucleotides based on those target sequences in an inhibition assay as known in the art and/or as described herein can lead to further improvements in the efficiency of inhibition.

[0195] Further still, such optimized sequences can be adjusted by, e.g., the introduction of alternative nucleosides, alternative sugar moieties, and/or alternative internucleosidic linkages as described herein or as known in the art, including alternative nucleosides, alternative sugar moieties, and/or alternative internucleosidic linkages as known in the art and/or discussed herein to further optimize the molecule (e.g., increasing serum stability or circulating half-life, increasing thermal stability, enhancing transmembrane delivery, targeting to a particular location or cell type, increasing interaction with silencing pathway enzymes, increasing release from endosomes) as an expression inhibitor. An antisense oligonucleotide agent as described herein can contain one or more mismatches to the target sequence. In one aspect, an antisense oligonucleotide as described herein contains no more than 3 mismatches. If the antisense oligonucleotide contains mismatches to a target sequence, in some aspects, the area of mismatch is not located in the center of the region of complementarity. If the antisense oligonucleotide contains mismatches to the target sequence, in some aspects, the mismatch should be restricted to be within the last 5 nucleotides from either the 5′- or 3′-end of the region of complementarity. For example, fora 30-linked nucleoside antisense oligonucleotide agent, the contiguous nucleobase region which is complementary to a region of a MLH1 gene, generally does not contain any mismatch within the central 5-10 linked nucleosides. The methods described herein or methods known in the art can be used to determine whether an antisense oligonucleotide containing a mismatch to a target sequence is effective in inhibiting the expression of MLH1. Consideration of the efficacy of antisense oligonucleotides with mismatches in inhibiting expression of MLH1 is important, especially if the particular region of complementarity in a MLH1 gene is known to have polymorphic sequence variation within the population.

[0196] Construction of vectors for expression of polynucleotides can be accomplished using conventional techniques which do not require detailed explanation to one of ordinary skill in the art. For generation of efficient expression vectors, it is necessary to have regulatory sequences that control the expression of the polynucleotide. These regulatory sequences include promoter and enhancer sequences and are influenced by specific cellular factors that interact with these sequences, and are well known in the art.

[0197] B. dsRNA Agents

[0198] In some aspects, the agent that reduces the level and/or activity of MLH1 is a polynucleotide. In some aspects, the polynucleotide is an inhibitory RNA molecule, e.g., that acts by way of the RNA interference (RNAi) pathway. An inhibitory RNA molecule can decrease the expression level (e.g., protein level or mRNA level) of MLH1. Inhibitory RNA molecules can be double stranded (dsRNA) molecules. For example, a dsRNA includes a short interfering RNA (siRNA) that targets full-length MLH1. A siRNA is a double-stranded RNA molecule that typically has a length of about 19-25 base pairs. In other aspects, the dsRNA is a short hairpin RNA (shRNA) that targets full-length MLH1. A shRNA is a dsRNA molecule including a hairpin turn that decreases expression of target genes via the RNAi pathway. In some aspects, the dsRNA molecule recruits an RNAse H enzyme. Degradation is caused by an enzymatic, RNA-induced silencing complex (RISC).

[0199] In some aspects, the dsRNA decreases the level and/or activity of a positive regulator of function. In other aspects, the dsRNA increases the level and/or activity of an inhibitor of a positive regulator of function. In some aspects, the dsRNA increases the level and/or activity of a negative regulator of function.

[0200] In some aspects, the dsRNA decreases the level and/or activity or function of MLH1. In some aspects, the dsRNA reduces expression of MLH1. In other aspects, the dsRNA increases degradation of MLH1 and/or decreases the stability (i.e., half-life) of MLH1. The dsRNA can be chemically synthesized or transcribed in vitro.

[0201] The dsRNA includes an antisense strand having a region of complementarity (e.g., a contiguous nucleobase region) which is complementary to at least a part of an mRNA formed in the expression of a MLH1 gene. The region of complementarity can be about 30 nucleotides or less in length (e.g., about 30, 29, 28, 27, 26, 25, 24, 23, 22, 21, 20, 19, or 18 nucleotides or less in length). Upon contact with a cell expressing the MLH1 gene, the dsRNA can reduce the expression of MLH1 (e.g., a human, a primate, a non-primate, or a bird MLH1) by at least about 10% as assayed by, for example, a PCR or branched DNA (bDNA)-based method, or by a protein-based method, such as by immunofluorescence analysis, using, for example, Western Blotting or flowcytometric techniques.

[0202] A dsRNA includes two RNA strands that are complementary and hybridize to form a duplex structure under conditions in which the dsRNA can be used. One strand of a dsRNA (the antisense strand) includes a region of complementarity that is substantially complementary, and generally fully complementary, to a target sequence. The target sequence can be derived from the sequence of an mRNA formed during the expression of a MLH1 gene. The other strand (the sense strand) includes a region that is complementary to the antisense strand, such that the two strands hybridize and form a duplex structure when combined under suitable conditions. As described elsewhere herein and as known in the art, the complementary sequences of a dsRNA can also be contained as self-complementary regions of a single nucleic acid molecule, as opposed to being on separate oligonucleotides. Generally, the duplex structure is between 15 and 30 linked nucleosides in length, e.g., between, 15-29, 15-28, 15-27, 15-26, 15-25, 15-24, 15-23, 15-22, 15-21, 15-20, 15-19, 15-18, 15-17, 18-30, 18-29, 18-28, 18-27, 18-26, 18-25, 18-24, 18-23, 18-22, 18-21, 18-20, 19-30, 19-29, 19-28, 19-27, 19-26, 19-25, 19-24, 19-23, 19-22, 19-21, 19-20, 20-30, 20-29, 20-28, 20-27, 20-26, 20-25, 20-24, 20-23, 20-22, 20-21, 21-30, 21-29, 21-28, 21-27, 21-26, 21-25, 21-24, 21-23, or 21-22 linked nucleosides in length. Ranges and lengths intermediate to the above recited ranges and lengths are also contemplated.

[0203] Similarly, the region of complementarity to the target sequence is between 15 and 30 linked nucleosides in length, e.g., between 15-29, 15-28, 15-27, 15-26, 15-25, 15-24, 15-23, 15-22, 15-21, 15-20, 15-19, 15-18, 15-17, 18-30, 18-29, 18-28, 18-27, 18-26, 18-25, 18-24, 18-23, 18-22, 18-21, 18-20, 19-30, 19-29, 19-28, 19-27, 19-26, 19-25, 19-24, 19-23, 19-22, 19-21, 19-20, 20-30, 20-29, 20-28, 20-27, 20-26, 20-25, 20-24, 20-23, 20-22, 20-21, 21-30, 21-29, 21-28, 21-27, 21-26, 21-25, 21-24, 21-23, or 21-22 linked nucleosides in length. Ranges and lengths intermediate to the above recited ranges and lengths are also contemplated.

[0204] In some aspects, the dsRNA is between about 15 and about 23 linked nucleosides in length, or between about 25 and about 30 linked nucleosides in length. In general, the dsRNA is long enough to serve as a substrate for the Dicer enzyme. For example, it is well known in the art that dsRNAs longer than about 21-23 linked nucleosides can serve as substrates for Dicer. As the ordinarily skilled person will also recognize, the region of an RNA targeted for cleavage will most often be part of a larger RNA molecule, often an mRNA molecule. Where relevant, a “part” of an mRNA target is a contiguous sequence of an mRNA target of sufficient length to allow it to be a substrate for RNAi-directed cleavage (i.e., cleavage through a RISC pathway).

[0205] One of skill in the art will also recognize that the duplex region is a primary functional portion of a dsRNA. Thus, in one aspect, to the extent that it becomes processed to a functional duplex, of e.g., 15-30 linked nucleosides, that targets a desired RNA for cleavage, an RNA molecule or complex of RNA molecules having a duplex region greater than 30 linked nucleosides is a dsRNA. Thus, an ordinarily skilled artisan will recognize that in one aspect, a dsRNA is not a naturally occurring dsRNA. In another aspect, a dsRNA agent useful to target MLH1 expression is not generated in the target cell by cleavage of a larger dsRNA.

[0206] A dsRNA as described herein can further include one or more single-stranded nucleoside overhangs e.g., 1, 2, 3, or 4 linked nucleosides. dsRNAs having at least one nucleoside overhang can have unexpectedly superior inhibitory properties relative to their blunt-ended counterparts. A nucleoside overhang can comprise or consist of a deoxyribonucleoside. The overhang(s) can be on the sense strand, the antisense strand, or any combination thereof. Furthermore, the nucleoside(s) of an overhang can be present on the 5′-end, 3′-end, or both ends of either an antisense or sense strand of a dsRNA.

[0207] A dsRNA can be synthesized by standard methods known in the art as further discussed below, e.g., by use of an automated DNA synthesizer, such as are commercially available from, for example, Biosearch, Applied Biosystems, Inc.

[0208] dsRNA compounds can be prepared using a two-step procedure. For example, the individual strands of the dsRNA are prepared separately. Then, the component strands are annealed. The individual strands of the dsRNA can be prepared using solution-phase or solid-phase organic synthesis or both. Organic synthesis offers the advantage that the oligonucleotide strands comprising unnatural or alternative nucleotides can be easily prepared. Double-stranded oligonucleotides can be prepared using solution-phase or solid-phase organic synthesis or both.

[0209] In one aspect, a dsRNA includes at least two nucleobase sequences, a sense sequence and an antisense sequence. In some aspects, the antisense strand comprises a nucleobase sequence of an antisense strand in Table 4, wherein the 5′ nucleotide represented by U of the antisense oligonucleotide is any nucleotide (e.g., U, A, G, C, T), and the sense strand comprises a nucleobase sequence complementary to the nucleobase sequence of the antisense strand. In other aspects, the sense strand comprises a nucleobase sequence of a sense strand in Table 4, and the antisense strand comprises a nucleobase sequence complementary to the nucleobase sequence of the sense strand. In some aspects, the antisense strand consists of a nucleobase sequence of an antisense strand in Table 4, wherein the 5′ nucleotide represented by U of the antisense oligonucleotide is any nucleotide (e.g., U, A, G, C, T), and the sense strand consists of a nucleobase sequence complementary to the nucleobase sequence of the antisense strand. In other aspects, the sense strand consists of a nucleobase sequence of a sense strand in Table 4, and the antisense strand consists of a nucleobase sequence complementary to the nucleobase sequence of the sense strand. In some aspects, the sense strand comprises a nucleobase sequence of a sense strand in any one of Tables 5-11, and the antisense strand comprises a nucleobase sequence complementary to the nucleobase sequence of the sense strand. In some aspects, the sense strand consists of a nucleobase sequence of a sense strand in any one of Tables 5-11, and the antisense strand consists of a nucleobase sequence complementary to the nucleobase sequence of the sense strand. In some aspects, the antisense strand comprises a nucleobase sequence of an antisense strand in Table 13, wherein the 5′ nucleotide represented by U of the antisense oligonucleotide is any nucleotide (e.g., U, A, G, C, T), and the sense strand comprises a nucleobase sequence complementary to the nucleobase sequence of the antisense strand. In other aspects, the antisense strand consists of a nucleobase sequence of an antisense strand in Table 13, wherein the 5′ nucleotide represented by U of the antisense oligonucleotide is any nucleotide (e.g., U, A, G, C, T), and the sense strand consists of a nucleobase sequence complementary to the nucleobase sequence of the antisense strand. In some aspects, the sense strand comprises a nucleobase sequence of a sense strand in Table 13, and the antisense strand comprises a nucleobase sequence complementary to the nucleobase sequence of the sense strand. In other aspects, the sense strand consists of a nucleobase sequence of a sense strand in Table 13, and the antisense strand consists of a nucleobase sequence complementary to the nucleobase sequence of the sense strand. In this aspect, one of the two sequences is complementary to the other of the two sequences, with one of the sequences being substantially complementary to a sequence of an mRNA generated in the expression of MLH1. As such, in this aspect, a dsRNA will include two oligonucleotides, where one oligonucleotide is described as the sense strand (passenger strand) in Table 4, and the second oligonucleotide is described as the corresponding antisense strand (guide strand) of the sense strand in Table 4, wherein the 5′ nucleotide represented by U of the antisense oligonucleotide is any nucleotide (e.g., U, A, G, C, T). In one aspect, the substantially complementary sequences of the dsRNA are contained on separate oligonucleotides. In another aspect, the substantially complementary sequences of the dsRNA are contained on a single oligonucleotide.

[0210] In one aspect, the antisense or sense strand of the dsRNA includes a region of at least 15 contiguous nucleobases having at least 80% (e.g., at least 85%, at least 90%, at least 95%, or at least 99%) complementary to at least 15 contiguous nucleotides of an MLH1 gene. In some aspects, the region of at least 15 contiguous that is complementary to an MLH1 gene corresponding to reference mRNA NM_000249.3 is one or more of positions 153-176, 267-388, 417-545, 792-995, 1639-1727, 1849-1900, 2105-2207, 2337-2387, 2426-2479 and 2508-2600 of the MLH1 gene. In some aspects, the region of at least 15 contiguous that is complementary to an MLH1 gene corresponding to reference mRNA NM_000249.3 is one or more of positions 326-388, 459-511, 805-878, 903-926, 1639-1720, and 2141-2192 of the MLH1 gene. In some aspects, the region of at least 15 contiguous that is complementary to an MLH1 gene corresponding to reference mRNA NM_000249.3 is one or more of positions 267-388, 417-545, 805-878, 903-995, 1639-1727, 1849-1900, 2141-2207, 2337-2387, and 2426-2479 of the MLH1 gene. In some aspects, the region of at least 15 contiguous that is complementary to an MLH1 gene corresponding to reference mRNA NM_000249.3 is one or more of positions 153-176, 267-388, 417-545, 792-995, 1639-1727, 1849-1900, 2105-2207, 2337-2387, and 2426-2479 of the MLH1 gene. In some aspects, the region of at least 15 contiguous that is complementary to an MLH1 gene corresponding to reference mRNA NM_000249.3 is one or more of positions 332-355, 459-545, 836-859, 1849-1900, 2141-2164, and 2426-2449 of the MLH1 gene. In some aspects, the region of at least 15 contiguous that is complementary to an MLH1 gene corresponding to reference mRNA NM_000249.3 is one or more of positions 267-388, 417-545, 805-995, 1639-1722, 1849-1900, 2105-2207, 2337-2387, 2426-2479, and 2508-2600 of the MLH1 gene.

[0211] In some aspects, a dsRNA having a sense strand or an antisense strand comprises the nucleobase sequence of any one of SEQ ID NOs: 1394-3353, wherein the 5′ nucleotide represented by U of the antisense oligonucleotide is any nucleotide (e.g., U, A, G, C, T).

[0212] In some aspects, the sense strand of the dsRNA comprises nucleobase sequence of any one of SEQ ID NOs: 1486, 1492, 1494, 1496, 1536, 1544, 1546, 1560, 1562, 1564, 1584, 1598, 1604, 1608, 1622, 1624, 1630, 1660, 1710, 1720, 1722, 1726, 1728, 1732, 1734, 1736, 1748, 1752, 1756, 1758, 1762, 1764, 1772, 1954, 1960, 1966, 1972, 1974, 1976, 1998, 2008, 2012, 2024, 2034, 2038, 2052, 2054, 2080, 2086, 2114, 2116, 2120, 2122, 2158, 2162, 2176, 2178, 2570, 2588, 2598, 2604, 2608, 2612, 2616, 2618, 2622, 2628, 2720, 2744, 2746, 2748, 2752, 2894, 2898, 2902, 2906, 2916, 2922, 2924, 2928, 2936, 2938, 2940, 2944, 2948, 2966, 3064, 3066, 3084, 3088, 3120, 3122, 3124, 3130, 3134, 3136, 3148, 3164, 3210, 3212, 3216, 3248, 3272, 3274, 3276, 3278, and 3288. In some aspects, the sense strand of the dsRNA comprises nucleobase sequence of any one of SEQ ID NOs: 1584, 1598, 1604, 1608, 1622, 1624, 1630, 1710, 1720, 1722, 1726, 1728, 1732, 1734, 1736, 1748, 1752, 1756, 1758, 1762, 1954, 1960, 1966, 1972, 1974, 1976, 1998, 2008, 2012, 2024, 2034, 2038, 2052, 2054, 2080, 2086, 2570, 2588, 2598, 2604, 2608, 2612, 2616, 2618, 2622, 2628, 2916, 2922, 2924, 2928, 2936, 2938, 2940, 2944, 2948, and 2966. In some aspects, the sense strand of the dsRNA comprises nucleobase sequence of any one of SEQ ID NOs: 1536, 1544, 1546, 1560, 1562, 1564, 1584, 1598, 1604, 1608, 1622, 1624, 1630, 1660, 1710, 1720, 1722, 1726, 1728, 1732, 1734, 1736, 1748, 1752, 1756, 1758, 1762, 1764, 1772, 1954, 1960, 1966, 1972, 1974, 1976, 1998, 2008, 2012, 2024, 2034, 2038, 2052, 2054, 2080, 2086, 2114, 2116, 2120, 2122, 2158, 2162, 2176, 2178, 2570, 2588, 2598, 2604, 2608, 2612, 2616, 2618, 2622, 2628, 2720, 2744, 2746, 2748, 2752, 2916, 2922, 2924, 2928, 2936, 2938, 2940, 2944, 2948, 2966, 3064, 3066, 3084, 3088, 3120, 3122, 3124, 3130, 3134, 3136, 3148, and 3164. In some aspects, the sense strand of the dsRNA comprises nucleobase sequence of any one of SEQ ID NOs: 1486, 1492, 1494, 1496, 1536, 1544, 1546, 1560, 1562, 1564, 1584, 1598, 1604, 1608, 1622, 1624, 1630, 1660, 1710, 1720, 1722, 1726, 1728, 1732, 1734, 1736, 1748, 1752, 1756, 1758, 1762, 1764, 1772, 1954, 1960, 1966, 1972, 1974, 1976, 1998, 2008, 2012, 2024, 2034, 2038, 2052, 2054, 2080, 2086, 2114, 2116, 2120, 2122, 2158, 2162, 2176, 2178, 2570, 2588, 2598, 2604, 2608, 2612, 2616, 2618, 2622, 2628, 2720, 2744, 2746, 2748, 2752, 2894, 2898, 2902, 2906, 2916, 2922, 2924, 2928, 2936, 2938, 2940, 2944, 2948, 2966, 3064, 3066, 3084, 3088, 3120, 3122, 3124, 3130, 3134, 3136, 3148, and 3164. In some aspects, the sense strand of the dsRNA comprises nucleobase sequence of any one of SEQ ID NOs: 1584, 1598, 1604, 1608, 1710, 1720, 1722, 1726, 1728, 1732, 1734, 1736, 1748, 1752, 1756, 1758, 1762, 1764, 1772, 1998, 2008, 2012, 2024, 2720, 2744, 2746, 2748, 2752, 2916, 2922, 2924, 2928, 2936, 2938, 2940, 2944, 3120, 3122, 3124, 3130, 3134, 3136, and 3148. In some aspects, the sense strand of the dsRNA comprises nucleobase sequence of any one of SEQ ID NOs: 1536, 1544, 1546, 1560, 1562, 1564, 1584, 1598, 1604, 1608, 1622, 1624, 1630, 1660, 1710, 1720, 1722, 1726, 1728, 1732, 1734, 1736, 1748, 1752, 1756, 1758, 1762, 1764, 1772, 1954, 1960, 1966, 1972, 1974, 1976, 1998, 2008, 2012, 2024, 2034, 2038, 2052, 2054, 2080, 2086, 2114, 2116, 2120, 2122, 2158, 2162, 2176, 2178, 2570, 2588, 2598, 2604, 2608, 2612, 2616, 2618, 2622, 2628, 2720, 2744, 2746, 2748, 2752, 2894, 2898, 2902, 2906, 2916, 2922, 2924, 2928, 2936, 2938, 2940, 2944, 2948, 2966, 3064, 3066, 3084, 3088, 3120, 3122, 3124, 3130, 3134, 3136, 3148, 3164, 3210, 3212, 3216, 3248, 3272, 3274, 3276, 3278, and 3288.

[0213] In some aspects, the antisense strand of the dsRNA comprises nucleobase sequence of any one of SEQ ID NOs: 1487, 1493, 1495, 1497, 1537, 1545, 1547, 1561, 1563, 1565, 1585, 1599, 1605, 1609, 1623, 1625, 1631, 1661, 1711, 1721, 1723, 1727, 1729, 1733, 1735, 1737, 1749, 1753, 1757, 1759, 1763, 1765, 1773, 1955, 1961, 1967, 1973, 1975, 1977, 1999, 2009, 2013, 2025, 2035, 2039, 2053, 2055, 2081, 2087, 2115, 2117, 2121, 2123, 2159, 2163, 2177, 2179, 2571, 2589, 2599, 2605, 2609, 2613, 2617, 2619, 2623, 2629, 2721, 2745, 2747, 2749, 2753, 2895, 2899, 2903, 2907, 2917, 2923, 2925, 2929, 2937, 2939, 2941, 2945, 2949, 2967, 3065, 3067, 3085, 3089, 3121, 3123, 3125, 3131, 3135, 3137, 3149, 3165, 3211, 3213, 3217, 3249, 3273, 3275, 3277, 3279, and 3289, wherein the 5′ nucleotide represented by U of the antisense oligonucleotide is any nucleotide (e.g., U, A, G, C, T). In some aspects, the antisense strand of the dsRNA comprises nucleobase sequence of any one of SEQ ID NOs: 1585, 1599, 1605, 1609, 1623, 1625, 1631, 1711, 1721, 1723, 1727, 1729, 1733, 1735, 1737, 1749, 1753, 1757, 1759, 1763, 1955, 1961, 1967, 1973, 1975, 1977, 1999, 2009, 2013, 2025, 2035, 2039, 2053, 2055, 2081, 2087, 2571, 2589, 2599, 2605, 2609, 2613, 2617, 2619, 2623, 2629, 2917, 2923, 2925, 2929, 2937, 2939, 2941, 2945, 2949, and 2967, wherein the 5′ nucleotide represented by U of the antisense oligonucleotide is any nucleotide (e.g., U, A, G, C, T). In some aspects, the antisense strand of the dsRNA comprises nucleobase sequence of any one of SEQ ID NOs: 1537, 1545, 1547, 1561, 1563, 1565, 1585, 1599, 1605, 1609, 1623, 1625, 1631, 1661, 1711, 1721, 1723, 1727, 1729, 1733, 1735, 1737, 1749, 1753, 1757, 1759, 1763, 1765, 1773, 1955, 1961, 1967, 1973, 1975, 1977, 1999, 2009, 2013, 2025, 2035, 2039, 2053, 2055, 2081, 2087, 2115, 2117, 2121, 2123, 2159, 2163, 2177, 2179, 2571, 2589, 2599, 2605, 2609, 2613, 2617, 2619, 2623, 2629, 2721, 2745, 2747, 2749, 2753, 2917, 2923, 2925, 2929, 2937, 2939, 2941, 2945, 2949, 2967, 3065, 3067, 3085, 3089, 3121, 3123, 3125, 3131, 3135, 3137, 3149, and 3165, wherein the 5′ nucleotide represented by U of the antisense oligonucleotide is any nucleotide (e.g., U, A, G, C, T). In some aspects, the antisense strand of the dsRNA comprises nucleobase sequence of any one of SEQ ID NOs: 1487, 1493, 1495, 1497, 1537, 1545, 1547, 1561, 1563, 1565, 1585, 1599, 1605, 1609, 1623, 1625, 1631, 1661, 1711, 1721, 1723, 1727, 1729, 1733, 1735, 1737, 1749, 1753, 1757, 1759, 1763, 1765, 1773, 1955, 1961, 1967, 1973, 1975, 1977, 1999, 2009, 2013, 2025, 2035, 2039, 2053, 2055, 2081, 2087, 2115, 2117, 2121, 2123, 2159, 2163, 2177, 2179, 2571, 2589, 2599, 2605, 2609, 2613, 2617, 2619, 2623, 2629, 2721, 2745, 2747, 2749, 2753, 2895, 2899, 2903, 2907, 2917, 2923, 2925, 2929, 2937, 2939, 2941, 2945, 2949, 2967, 3065, 3067, 3085, 3089, 3121, 3123, 3125, 3131, 3135, 3137, 3149, and 3165, wherein the 5′ nucleotide represented by U of the antisense oligonucleotide is any nucleotide (e.g., U, A, G, C, T). In some aspects, the antisense strand of the dsRNA comprises nucleobase sequence of any one of SEQ ID NOs: 1585, 1599, 1605, 1609, 1711, 1721, 1723, 1727, 1729, 1733, 1735, 1737, 1749, 1753, 1757, 1759, 1763, 1765, 1773, 1999, 2009, 2013, 2025, 2721, 2745, 2747, 2749, 2753, 2917, 2923, 2925, 2929, 2937, 2939, 2941, 2945, 3121, 3123, 3125, 3131, 3135, 3137, and 3149, wherein the 5′ nucleotide represented by U of the antisense oligonucleotide is any nucleotide (e.g., U, A, G, C, T). In some aspects, the antisense strand of the dsRNA comprises nucleobase sequence of any one of SEQ ID NOs: 1537, 1545, 1547, 1561, 1563, 1565, 1585, 1599, 1605, 1609, 1623, 1625, 1631, 1661, 1711, 1721, 1723, 1727, 1729, 1733, 1735, 1737, 1749, 1753, 1757, 1759, 1763, 1765, 1773, 1955, 1961, 1967, 1973, 1975, 1977, 1999, 2009, 2013, 2025, 2035, 2039, 2053, 2055, 2081, 2087, 2115, 2117, 2121, 2123, 2159, 2163, 2177, 2179, 2571, 2589, 2599, 2605, 2609, 2613, 2617, 2619, 2623, 2629, 2721, 2745, 2747, 2749, 2753, 2895, 2899, 2903, 2907, 2917, 2923, 2925, 2929, 2937, 2939, 2941, 2945, 2949, 2967, 3065, 3067, 3085, 3089, 3121, 3123, 3125, 3131, 3135, 3137, 3149, 3165, 3211, 3213, 3217, 3249, 3273, 3275, 3277, 3279, and 3289, wherein the 5′ nucleotide represented by U of the antisense oligonucleotide is any nucleotide (e.g., U, A, G, C, T).

[0214] In some aspects, a dsRNA having a sense strand or an antisense strand consists of the nucleobase sequence of any one of SEQ ID NOs: 1394-3353, wherein the 5′ nucleotide represented by U of the antisense oligonucleotide is any nucleotide (e.g., U, A, G, C, T).

[0215] In some aspects, the sense strand of the dsRNA consists of nucleobase sequence of any one of SEQ ID NOs: 1486, 1492, 1494, 1496, 1536, 1544, 1546, 1560, 1562, 1564, 1584, 1598, 1604, 1608, 1622, 1624, 1630, 1660, 1710, 1720, 1722, 1726, 1728, 1732, 1734, 1736, 1748, 1752, 1756, 1758, 1762, 1764, 1772, 1954, 1960, 1966, 1972, 1974, 1976, 1998, 2008, 2012, 2024, 2034, 2038, 2052, 2054, 2080, 2086, 2114, 2116, 2120, 2122, 2158, 2162, 2176, 2178, 2570, 2588, 2598, 2604, 2608, 2612, 2616, 2618, 2622, 2628, 2720, 2744, 2746, 2748, 2752, 2894, 2898, 2902, 2906, 2916, 2922, 2924, 2928, 2936, 2938, 2940, 2944, 2948, 2966, 3064, 3066, 3084, 3088, 3120, 3122, 3124, 3130, 3134, 3136, 3148, 3164, 3210, 3212, 3216, 3248, 3272, 3274, 3276, 3278, and 3288. In some aspects, the sense strand of the dsRNA consists of nucleobase sequence of any one of SEQ ID NOs: 1584, 1598, 1604, 1608, 1622, 1624, 1630, 1710, 1720, 1722, 1726, 1728, 1732, 1734, 1736, 1748, 1752, 1756, 1758, 1762, 1954, 1960, 1966, 1972, 1974, 1976, 1998, 2008, 2012, 2024, 2034, 2038, 2052, 2054, 2080, 2086, 2570, 2588, 2598, 2604, 2608, 2612, 2616, 2618, 2622, 2628, 2916, 2922, 2924, 2928, 2936, 2938, 2940, 2944, 2948, and 2966. In some aspects, the sense strand of the dsRNA consists of nucleobase sequence of any one of SEQ ID NOs: 1536, 1544, 1546, 1560, 1562, 1564, 1584, 1598, 1604, 1608, 1622, 1624, 1630, 1660, 1710, 1720, 1722, 1726, 1728, 1732, 1734, 1736, 1748, 1752, 1756, 1758, 1762, 1764, 1772, 1954, 1960, 1966, 1972, 1974, 1976, 1998, 2008, 2012, 2024, 2034, 2038, 2052, 2054, 2080, 2086, 2114, 2116, 2120, 2122, 2158, 2162, 2176, 2178, 2570, 2588, 2598, 2604, 2608, 2612, 2616, 2618, 2622, 2628, 2720, 2744, 2746, 2748, 2752, 2916, 2922, 2924, 2928, 2936, 2938, 2940, 2944, 2948, 2966, 3064, 3066, 3084, 3088, 3120, 3122, 3124, 3130, 3134, 3136, 3148, and 3164. In some aspects, the sense strand of the dsRNA consists of nucleobase sequence of any one of SEQ ID NOs: 1486, 1492, 1494, 1496, 1536, 1544, 1546, 1560, 1562, 1564, 1584, 1598, 1604, 1608, 1622, 1624, 1630, 1660, 1710, 1720, 1722, 1726, 1728, 1732, 1734, 1736, 1748, 1752, 1756, 1758, 1762, 1764, 1772, 1954, 1960, 1966, 1972, 1974, 1976, 1998, 2008, 2012, 2024, 2034, 2038, 2052, 2054, 2080, 2086, 2114, 2116, 2120, 2122, 2158, 2162, 2176, 2178, 2570, 2588, 2598, 2604, 2608, 2612, 2616, 2618, 2622, 2628, 2720, 2744, 2746, 2748, 2752, 2894, 2898, 2902, 2906, 2916, 2922, 2924, 2928, 2936, 2938, 2940, 2944, 2948, 2966, 3064, 3066, 3084, 3088, 3120, 3122, 3124, 3130, 3134, 3136, 3148, and 3164. In some aspects, the sense strand of the dsRNA consists of nucleobase sequence of any one of SEQ ID NOs: 1584, 1598, 1604, 1608, 1710, 1720, 1722, 1726, 1728, 1732, 1734, 1736, 1748, 1752, 1756, 1758, 1762, 1764, 1772, 1998, 2008, 2012, 2024, 2720, 2744, 2746, 2748, 2752, 2916, 2922, 2924, 2928, 2936, 2938, 2940, 2944, 3120, 3122, 3124, 3130, 3134, 3136, and 3148. In some aspects, the sense strand of the dsRNA consists of nucleobase sequence of any one of SEQ ID NOs: 1536, 1544, 1546, 1560, 1562, 1564, 1584, 1598, 1604, 1608, 1622, 1624, 1630, 1660, 1710, 1720, 1722, 1726, 1728, 1732, 1734, 1736, 1748, 1752, 1756, 1758, 1762, 1764, 1772, 1954, 1960, 1966, 1972, 1974, 1976, 1998, 2008, 2012, 2024, 2034, 2038, 2052, 2054, 2080, 2086, 2114, 2116, 2120, 2122, 2158, 2162, 2176, 2178, 2570, 2588, 2598, 2604, 2608, 2612, 2616, 2618, 2622, 2628, 2720, 2744, 2746, 2748, 2752, 2894, 2898, 2902, 2906, 2916, 2922, 2924, 2928, 2936, 2938, 2940, 2944, 2948, 2966, 3064, 3066, 3084, 3088, 3120, 3122, 3124, 3130, 3134, 3136, 3148, 3164, 3210, 3212, 3216, 3248, 3272, 3274, 3276, 3278, and 3288.

[0216] In some aspects, the antisense strand of the dsRNA consists of nucleobase sequence of any one of SEQ ID NOs: 1487, 1493, 1495, 1497, 1537, 1545, 1547, 1561, 1563, 1565, 1585, 1599, 1605, 1609, 1623, 1625, 1631, 1661, 1711, 1721, 1723, 1727, 1729, 1733, 1735, 1737, 1749, 1753, 1757, 1759, 1763, 1765, 1773, 1955, 1961, 1967, 1973, 1975, 1977, 1999, 2009, 2013, 2025, 2035, 2039, 2053, 2055, 2081, 2087, 2115, 2117, 2121, 2123, 2159, 2163, 2177, 2179, 2571, 2589, 2599, 2605, 2609, 2613, 2617, 2619, 2623, 2629, 2721, 2745, 2747, 2749, 2753, 2895, 2899, 2903, 2907, 2917, 2923, 2925, 2929, 2937, 2939, 2941, 2945, 2949, 2967, 3065, 3067, 3085, 3089, 3121, 3123, 3125, 3131, 3135, 3137, 3149, 3165, 3211, 3213, 3217, 3249, 3273, 3275, 3277, 3279, and 3289, wherein the 5′ nucleotide represented by U of the antisense oligonucleotide is any nucleotide (e.g., U, A, G, C, T). In some aspects, the antisense strand of the dsRNA consists of nucleobase sequence of any one of SEQ ID NOs: 1585, 1599, 1605, 1609, 1623, 1625, 1631, 1711, 1721, 1723, 1727, 1729, 1733, 1735, 1737, 1749, 1753, 1757, 1759, 1763, 1955, 1961, 1967, 1973, 1975, 1977, 1999, 2009, 2013, 2025, 2035, 2039, 2053, 2055, 2081, 2087, 2571, 2589, 2599, 2605, 2609, 2613, 2617, 2619, 2623, 2629, 2917, 2923, 2925, 2929, 2937, 2939, 2941, 2945, 2949, and 2967, wherein the 5′ nucleotide represented by U of the antisense oligonucleotide is any nucleotide (e.g., U, A, G, C, T). In some aspects, the antisense strand of the dsRNA consists of nucleobase sequence of any one of SEQ ID NOs: 1537, 1545, 1547, 1561, 1563, 1565, 1585, 1599, 1605, 1609, 1623, 1625, 1631, 1661, 1711, 1721, 1723, 1727, 1729, 1733, 1735, 1737, 1749, 1753, 1757, 1759, 1763, 1765, 1773, 1955, 1961, 1967, 1973, 1975, 1977, 1999, 2009, 2013, 2025, 2035, 2039, 2053, 2055, 2081, 2087, 2115, 2117, 2121, 2123, 2159, 2163, 2177, 2179, 2571, 2589, 2599, 2605, 2609, 2613, 2617, 2619, 2623, 2629, 2721, 2745, 2747, 2749, 2753, 2917, 2923, 2925, 2929, 2937, 2939, 2941, 2945, 2949, 2967, 3065, 3067, 3085, 3089, 3121, 3123, 3125, 3131, 3135, 3137, 3149, and 3165, wherein the 5′ nucleotide represented by U of the antisense oligonucleotide is any nucleotide (e.g., U, A, G, C, T). In some aspects, the antisense strand of the dsRNA consists of nucleobase sequence of any one of SEQ ID NOs: 1487, 1493, 1495, 1497, 1537, 1545, 1547, 1561, 1563, 1565, 1585, 1599, 1605, 1609, 1623, 1625, 1631, 1661, 1711, 1721, 1723, 1727, 1729, 1733, 1735, 1737, 1749, 1753, 1757, 1759, 1763, 1765, 1773, 1955, 1961, 1967, 1973, 1975, 1977, 1999, 2009, 2013, 2025, 2035, 2039, 2053, 2055, 2081, 2087, 2115, 2117, 2121, 2123, 2159, 2163, 2177, 2179, 2571, 2589, 2599, 2605, 2609, 2613, 2617, 2619, 2623, 2629, 2721, 2745, 2747, 2749, 2753, 2895, 2899, 2903, 2907, 2917, 2923, 2925, 2929, 2937, 2939, 2941, 2945, 2949, 2967, 3065, 3067, 3085, 3089, 3121, 3123, 3125, 3131, 3135, 3137, 3149, and 3165, wherein the 5′ nucleotide represented by U of the antisense oligonucleotide is any nucleotide (e.g., U, A, G, C, T). In some aspects, the antisense strand of the dsRNA consists of nucleobase sequence of any one of SEQ ID NOs: 1585, 1599, 1605, 1609, 1711, 1721, 1723, 1727, 1729, 1733, 1735, 1737, 1749, 1753, 1757, 1759, 1763, 1765, 1773, 1999, 2009, 2013, 2025, 2721, 2745, 2747, 2749, 2753, 2917, 2923, 2925, 2929, 2937, 2939, 2941, 2945, 3121, 3123, 3125, 3131, 3135, 3137, and 3149, wherein the 5′ nucleotide represented by U of the antisense oligonucleotide is any nucleotide (e.g., U, A, G, C, T). In some aspects, the antisense strand of the dsRNA consists of nucleobase sequence of any one of SEQ ID NOs: 1537, 1545, 1547, 1561, 1563, 1565, 1585, 1599, 1605, 1609, 1623, 1625, 1631, 1661, 1711, 1721, 1723, 1727, 1729, 1733, 1735, 1737, 1749, 1753, 1757, 1759, 1763, 1765, 1773, 1955, 1961, 1967, 1973, 1975, 1977, 1999, 2009, 2013, 2025, 2035, 2039, 2053, 2055, 2081, 2087, 2115, 2117, 2121, 2123, 2159, 2163, 2177, 2179, 2571, 2589, 2599, 2605, 2609, 2613, 2617, 2619, 2623, 2629, 2721, 2745, 2747, 2749, 2753, 2895, 2899, 2903, 2907, 2917, 2923, 2925, 2929, 2937, 2939, 2941, 2945, 2949, 2967, 3065, 3067, 3085, 3089, 3121, 3123, 3125, 3131, 3135, 3137, 3149, 3165, 3211, 3213, 3217, 3249, 3273, 3275, 3277, 3279, and 3289, wherein the 5′ nucleotide represented by U of the antisense oligonucleotide is any nucleotide (e.g., U, A, G, C, T).

[0217] In some aspects, the dsRNA exhibits at least 50% mRNA inhibition at 0.5 nM dsRNA concentration when determined using a cell assay when compared with a control cell. In some aspects, the dsRNA exhibits at least 40% mRNA inhibition at 0.5 nM dsRNA concentration when determined using a cell assay when compared with a control cell. In some aspects, the dsRNA exhibits at least 30% mRNA inhibition at 0.5 nM dsRNA concentration when determined using a cell assay when compared with a control cell. In some aspects, the dsRNA exhibits at least 60% mRNA inhibition at 10 nM dsRNA concentration when determined using a cell assay when compared with a control cell. In some aspects, the dsRNA exhibits at least 50% mRNA inhibition at 10 nM dsRNA concentration when determined using a cell assay when compared with a control cell.

[0218] In some aspects, the dsRNA comprises an antisense strand that is complementary to at least 17 contiguous nucleotides of an MLH1 gene. In other aspects, the dsRNA comprises an antisense strand that is complementary to at least 19 contiguous nucleotides of an MLH1 gene. In other aspects, the dsRNA comprises an antisense strand that is complementary to 19 contiguous nucleotides of an MLH1 gene.

[0219] Multiple dsRNAs can be joined together by a linker. The linker can be cleavable or non-cleavable. The dsRNAs can be the same or different.

[0220] In some aspects, a dsRNA has a sense strand or an antisense strand having a nucleobase sequence with at least 50% (e.g., at least 50%, at least 60%, at least 70%, at least 80%, at least 85%, at least 90%, at least 95%, at least 96%, at least 97%, at least 98%, at least 99%, or 100%) sequence identity to the nucleobase sequence any one of SEQ ID NOs: 1394-3353, wherein the 5′ nucleotide represented by U of the antisense oligonucleotide is any nucleotide (e.g., U, A, G, C, T). In some aspects, a dsRNA has a sense strand or an antisense strand having a nucleobase sequence with at least 85% sequence identity to the nucleobase sequence of any one of SEQ ID NOs: 1394-3353, wherein the 5′ nucleotide represented by U of the antisense oligonucleotide is any nucleotide (e.g., U, A, G, C, T).

[0221] It will be understood that, although the sequences in SEQ ID NOs: 1394-3353 are described as unmodified and/or un-conjugated sequences, the RNA of the dsRNA] can comprise any one of the sequences set forth in any one of SEQ ID NOs: 1394-3353 that is an alternative nucleoside and/or conjugated as described in detail below.

[0222] The skilled person is well aware that dsRNAs having a duplex structure of between about 20 and 23 linked nucleosides, e.g., 21 linked nucleosides, have been hailed as particularly effective in inducing RNA interference (Elbashir et al., (2001) EMBO J., 20:6877-6888). However, others have found that shorter or longer RNA duplex structures can be effective (Chu and Rana (2007) RNA 14:1714-1719; Kim et al. (2005) Nat Biotech 23:222-226). In the aspects described above, by virtue of the nature of the oligonucleotide sequences provided herein, dsRNAs described herein can include at least one strand of a length of minimally 21 linked nucleosides. It can be reasonably expected that shorter duplexes minus only a few linked nucleosides on one or both ends can be similarly effective as compared to the dsRNAs described above. Hence, dsRNAs having a sequence of at least 8, 9, 10, 11, 12, 13, 14, 15, 16, 17, 18, 19, 20, or more contiguous linked nucleosides derived from one of the sequences provided herein, and differing in their ability to reduce the expression of MLH1 by not more than about 5, 10, 15, 20, 25, or 30% reduction from a dsRNA comprising the full sequence, are contemplated.

[0223] In addition, the RNAs described herein identify a site(s) in a MLH1 transcript that is susceptible to RISC-mediated cleavage. As used herein, a dsRNA is said to target within a particular site of an RNA transcript if the dsRNA promotes cleavage of the transcript anywhere within that particular site. Such a dsRNA will generally include at least about 15 contiguous linked nucleosides from one of the sequences provided herein coupled to additional linked nucleoside sequences taken from the region contiguous to the selected sequence in a MLH1 gene.

[0224] Inhibitory dsRNAs can be designed by methods well known in the art. While a target sequence is generally about 15-30 linked nucleosides in length, there is wide variation in the suitability of particular sequences in this range for directing cleavage of any given target RNA.

[0225] dsRNAs (e.g., siRNA and shRNA molecules) with homology sufficient to provide sequence specificity required to uniquely degrade any RNA can be designed using programs known in the art.

[0226] Systematic testing of several designed species for optimization of the inhibitory dsRNA sequence can be undertaken in accordance with the teachings provided herein. Considerations when designing interfering oligonucleotides include, but are not limited to, biophysical, thermodynamic, and structural considerations, base preferences at specific positions in the sense strand, and homology. The making and use of inhibitory therapeutic agents based on non-coding RNA such as siRNAs and shRNAs are also known in the art, for example, as described in Sioud, RNA Therapeutics: Function, Design, and Delivery (Methods in Molecular Biology). Humana Press 2010.

[0227] Various software packages and the guidelines set out herein provide guidance for the identification of optimal target sequences for any given gene target, but an empirical approach can be taken in which a “window” or “mask” of a given size (as a non-limiting example, 21 nucleotides) is literally or figuratively (including, e.g., in silico) placed on the target RNA sequence to identify sequences in the size range that can serve as target sequences. By moving the sequence “window” progressively one nucleotide upstream or downstream of an initial target sequence location, the next potential target sequence can be identified, until the complete set of possible sequences is identified for any given target size selected. This process, coupled with systematic synthesis and testing of the identified sequences (using assays as described herein or as known in the art) to identify those sequences that perform optimally can identify those RNA sequences that, when targeted with a dsRNA agent, mediate the best reduction of target gene expression. Thus, while the sequences identified herein represent effective target sequences, it is contemplated that further optimization of reduction efficiency can be achieved by progressively “walking the window” one nucleotide upstream or downstream of the given sequences to identify sequences with equal or better reduction characteristics.

[0228] Further, it is contemplated that for any sequence identified herein, further optimization could be achieved by systematically either adding or removing linked nucleosides to generate longer or shorter sequences and testing those sequences generated by walking a window of the longer or shorter size up or down the target RNA from that point. Again, coupling this approach to generating new candidate targets with testing for effectiveness of dsRNAs based on those target sequences in an inhibition assay as known in the art and/or as described herein can lead to further improvements in the efficiency of inhibition.

[0229] Further still, such optimized sequences can be adjusted by, e.g., addition or changes in overhang, the introduction of alternative nucleosides, alternative sugar moieties, and/or alternative internucleosidic linkages as described herein or as known in the art, including alternative nucleosides, alternative sugar moieties, and/or alternative internucleosidic linkages as known in the art and/or discussed herein to further optimize the molecule (e.g., increasing serum stability or circulating half-life, increasing thermal stability, enhancing transmembrane delivery, targeting to a particular location or cell type, increasing interaction with silencing pathway enzymes, increasing release from endosomes) as an expression inhibitor. A dsRNA agent as described herein can contain one or more mismatches to the target sequence. In one aspect, a dsRNA as described herein contains no more than 3 mismatches. If the antisense strand of the dsRNA contains mismatches to a target sequence, it is preferable that the area of mismatch is not located in the center of the region of complementarity.

[0230] If the antisense strand of the dsRNA contains mismatches to the target sequence, the mismatch can be restricted to be within the last 5 nucleotides from either the 5′- or 3′-end of the region of complementarity. For example, for a 23-nucleotide dsRNA, the strand which is complementary to a region of a MLH1 gene, generally does not contain any mismatch within the central 13 nucleotides. The methods described herein or methods known in the art can be used to determine whether a dsRNA containing a mismatch to a target sequence is effective in reducing the expression of MLH1. Consideration of the efficacy of dsRNAs with mismatches in reducing expression of MLH1 is important, especially if the particular region of complementarity in MLH1 is known to have polymorphic sequence variation within the population.

[0231] Construction of vectors for expression of polynucleotides can be accomplished using conventional techniques which do not require detailed explanation to one of ordinary skill in the art. For generation of efficient expression vectors, it is necessary to have regulatory sequences that control the expression of the polynucleotide. These regulatory sequences include promoter and enhancer sequences and are influenced by specific cellular factors that interact with these sequences, and are well known in the art.

[0232] C. Alternative Antisense Oligonucleosides or dsRNA

[0233] In one aspect, one or more of the linked nucleosides or internucleosidic linkages of the antisense oligonucleotide or dsRNA, is naturally occurring, and does not comprise, e.g., chemical modifications and/or conjugations known in the art and described herein. In another aspect, one or more of the linked nucleosides or internucleosidic linkages of an antisense oligonucleotide or dsRNA, is chemically modified to enhance stability or other beneficial characteristics. Without being bound by theory, it is believed that certain modifications can increase nuclease resistance and/or serum stability, or decrease immunogenicity. For example, antisense oligonucleotides or dsRNAs can contain nucleotides found to occur naturally in DNA or RNA (e.g., adenine, thymidine, guanosine, cytidine, uridine, or inosine) or can contain alternative nucleosides or internucleosidic linkages which have one or more chemical modifications to one or more components of the nucleotide (e.g., the nucleobase, sugar, or phospho-linker moiety). Antisense oligonucleotides or dsRNAs can be linked to one another through naturally occurring phosphodiester bonds, or can contain alternative linkages (e.g., covalently linked through phosphorothioate (e.g., Sp phosphorothioate or Rp phosphorothioate), 3′-methylenephosphonate, 5′-methylenephosphonate, 3′-phosphoamidate, 2′-5′ phosphodiester, guanidinium, S-methylthiourea, 2′-alkoxy, alkyl phosphate, and/or peptide bonds).

[0234] In certain aspects, substantially all of the nucleosides or internucleosidic linkages of an antisense oligonucleotide or dsRNA are alternative nucleosides. In other aspects, all of the nucleosides or internucleosidic linkages of an antisense oligonucleotide or dsRNA are alternative nucleosides. Antisense oligonucleotides or dsRNAs in which “substantially all of the nucleosides are alternative nucleosides” are largely but not wholly modified and can include not more than five, four, three, two, or one naturally-occurring nucleosides. In still other aspects, antisense oligonucleotides or dsRNAs can include not more than five, four, three, two, or one alternative nucleosides.

[0235] The nucleic acids can be synthesized and/or modified by methods well established in the art, such as those described in “Current protocols in nucleic acid chemistry,” Beaucage, S. L. et al. (Edrs.), John Wiley & Sons, Inc., New York, N.Y., USA, which is hereby incorporated herein by reference. Alternative nucleotides and nucleosides include those with modifications including, for example, end modifications, e.g., 5′-end modifications (phosphorylation, conjugation, inverted linkages) or 3′-end modifications (conjugation, DNA nucleotides, inverted linkages, etc.); base modifications, e.g., replacement with stabilizing bases, destabilizing bases, or bases that base pair with an expanded repertoire of partners, removal of bases (abasic nucleotides), or conjugated bases; sugar modifications (e.g., at the 2′-position or 4′-position) or replacement of the sugar; and/or backbone modifications, including modification or replacement of the phosphodiester linkages. The nucleobase can be an isonucleoside in which the nucleobase is moved from the C1 position of the sugar moiety to a different position (e.g. C2, C3, C4, or C5). Specific examples of antisense oligonucleotide or dsRNA compounds useful in the aspects described herein include, but are not limited to alternative nucleosides containing modified backbones or no natural internucleoside linkages. Nucleotides and nucleosides having modified backbones include, among others, those that do not have a phosphorus atom in the backbone. For the purposes of this specification, and as sometimes referenced in the art, alternative RNAs that do not have a phosphorus atom in their internucleoside backbone can be considered to be oligonucleosides. In some aspects, an antisense oligonucleotide or dsRNA will have a phosphorus atom in its internucleoside backbone.

[0236] Alternative internucleoside linkages include, for example, phosphorothioates, chiral phosphorothioates, phosphorodithioates, phosphotriesters, aminoalkylphosphotriesters, methyl and other alkyl phosphonates including 3′-alkylene phosphonates and chiral phosphonates, phosphinates, phosphoramidates including 3′-amino phosphoramidate and aminoalkylphosphoramidates, thionophosphoramidates, thionoalkylphosphonates, thionoalkylphosphotriesters, and boronophosphates having normal 3′-5′ linkages, 2′-5′-linked analogs of these, and those having inverted polarity wherein the adjacent pairs of nucleoside units are linked 3′-5′ to 5′-3′ or 2′-5′ to 5′-2′. Various salts, mixed salts, and free acid forms are also included.

[0237] Representative U.S. patents that teach the preparation of the above phosphorus-containing linkages include, but are not limited to, U.S. Pat. Nos. 3,687,808; 4,469,863; 4,476,301; 5,023,243; 5,177,195; 5,188,897; 5,264,423; 5,276,019; 5,278,302; 5,286,717; 5,321,131; 5,399,676; 5,405,939; 5,453,496; 5,455,233; 5,466,677; 5,476,925; 5,519,126; 5,536,821; 5,541,316; 5,550,111; 5,563,253; 5,571,799; 5,587,361; 5,625,050; 6,028,188; 6,124,445; 6,160,109; 6,169,170; 6,172,209; 6,239,265; 6,277,603; 6,326,199; 6,346,614; 6,444,423; 6,531,590; 6,534,639; 6,608,035; 6,683,167; 6,858,715; 6,867,294; 6,878,805; 7,015,315; 7,041,816; 7,273,933; 7,321,029; and U.S. Pat. RE39464, the entire contents of each of which are hereby incorporated herein by reference.

[0238] Alternative internucleoside linkages that do not include a phosphorus atom therein have backbones that are formed by short chain alkyl or cycloalkyl internucleoside linkages, mixed heteroatoms and alkyl or cycloalkyl internucleoside linkages, or one or more short chain heteroatomic or heterocyclic internucleoside linkages. These include those having morpholino linkages (formed in part from the sugar portion of a nucleoside); siloxane backbones; sulfide, sulfoxide and sulfone backbones; formacetyl and thioformacetyl backbones; methylene formacetyl and thioformacetyl backbones; alkene containing backbones; sulfamate backbones; methyleneimino and methylenehydrazino backbones; sulfonate and sulfonamide backbones; amide backbones; and others having mixed N, O, S, and CH₂ component parts.

[0239] Representative U.S. patents that teach the preparation of the above oligonucleosides include, but are not limited to, U.S. Pat. Nos. 5,034,506; 5,166,315; 5,185,444; 5,214,134; 5,216,141; 5,235,033; 5,64,562; 5,264,564; 5,405,938; 5,434,257; 5,466,677; 5,470,967; 5,489,677; 5,541,307; 5,561,225; 5,596,086; 5,602,240; 5,608,046; 5,610,289; 5,618,704; 5,623,070; 5,663,312; 5,633,360; 5,677,437; and, 5,677,439, the entire contents of each of which are hereby incorporated herein by reference.

[0240] In other aspects, suitable antisense oligonucleotides or dsRNAs include those in which both the sugar and the internucleoside linkage, i.e., the backbone, of the nucleotide units are replaced. The base units are maintained for hybridization with an appropriate nucleic acid target compound. One such oligomeric compound, a mimetic that has been shown to have excellent hybridization properties, is referred to as a peptide nucleic acid (PNA). In PNA compounds, the sugar of a nucleoside is replaced with an amide containing backbone, in particular an aminoethylglycine backbone. The nucleobases are retained and are bound directly or indirectly to aza nitrogen atoms of the amide portion of the backbone. Representative U.S. patents that teach the preparation of PNA compounds include, but are not limited to, U.S. Pat. Nos. 5,539,082; 5,714,331; and 5,719,262, the entire contents of each of which are hereby incorporated herein by reference. Additional PNA compounds suitable for use in the antisense oligonucleotides or dsRNAs are described in, for example, in Nielsen et al., Science, 1991, 254, 1497-1500.

[0241] Some aspects include antisense oligonucleotides or dsRNAs with phosphorothioate backbones and antisense oligonucleotides or dsRNAs with heteroatom backbones, and in particular —CH₂—NH—CH₂—, —CH₂—N(CH₃)—O—CH₂-[known as a methylene (methylimino) or MMI backbone], —CH₂—O—N(CH₃)—CH₂—, —CH₂—N(CH₃)—N(CH₃)—CH₂— and —N(CH₃)—CH₂—CH₂-[wherein the native phosphodiester backbone is represented as —O—P—O—CH₂-] of the above-referenced U.S. Pat. No. 5,489,677, and the amide backbones of the above-referenced U.S. Pat. No. 5,602,240. In some aspects, the antisense oligonucleotides or dsRNA featured herein have morpholino backbone structures of the above-referenced U.S. Pat. No. 5,034,506. In other aspects, the antisense oligonucleotides or dsRNAs described herein include phosphorodiamidate morpholino oligomers (PMO), in which the deoxyribose moiety is replaced by a morpholine ring, and the charged phosphodiester inter-subunit linkage is replaced by an uncharged phophorodiamidate linkage, as described in Summerton, et al., Antisense Nucleic Acid Drug Dev. 1997, 7:63-70.

[0242] Alternative nucleosides and nucleotides can contain one or more substituted sugar moieties. The antisense oligonucleotides or dsRNAs, e.g., siRNAs and shRNAs, featured herein can include one of the following at the 2′-position: OH; F; O-, S-, or N-alkyl; O-, S-, or N-alkenyl; O-, S- or N-alkynyl; or O-alkyl-O-alkyl, wherein the alkyl, alkenyl and alkynyl can be substituted or unsubstituted C₁ to C₁₀ alkyl or C₂ to C₁₀alkenyl and alkynyl. Exemplary suitable modifications include —O[(CH₂)ₙO]ₘCH₃, —O(CH₂)ₙOCH₃, —O(CH₂)ₙ—NH₂, —O(CH₂)ₙCH₃, —O(CH₂)ₙ—ONH₂, and —O(CH₂)ₙ—ON[(CH₂)ₙCH₃]₂, where n and m are from 1 to about 10. In other aspects, antisense oligonucleotides or dsRNAs include one of the following at the 2′ position: C₁ to C₁₀ lower alkyl, substituted lower alkyl, alkaryl, aralkyl, O-alkaryl or O-aralkyl, SH, SCH₃, OCN, Cl, Br, CN, CF₃, OCF₃, SOCH₃, SO₂CH₃, ONO₂, NO₂, N₃, NH₂, heterocycloalkyl, heterocycloalkaryl, aminoalkylamino, polyalkylamino, substituted silyl, an RNA cleaving group, a reporter group, an intercalator, a group for improving the pharmacokinetic properties of an antisense oligonucleotide or dsRNA, or a group for improving the pharmacodynamic properties of an antisense oligonucleotide or dsRNA, and other substituents having similar properties. In some aspects, the modification includes a 2′-methoxyethoxy (2′-O—CH₂CH₂OCH₃, also known as 2′-O-(2-methoxyethyl) or 2′-MOE) (Martin et al., Helv. Chin. Acta, 1995, 78:486-504) i.e., an alkoxy-alkoxy group. MOE nucleosides confer several beneficial properties to antisense oligonucleotides or dsRNAs including, but not limited to, increased nuclease resistance, improved pharmacokinetics properties, reduced non-specific protein binding, reduced toxicity, reduced immunostimulatory properties, and enhanced target affinity as compared to unmodified antisense oligonucleotides or dsRNAs.

[0243] Another exemplary alternative contains 2′-dimethylaminooxyethoxy, i.e., a —O(CH₂)₂ON(CH₃)₂ group, also known as 2′-DMAOE, as described in examples herein below, and 2′-dimethylaminoethoxyethoxy (also known in the art as 2′-O-dimethylaminoethoxyethyl or 2′-DMAEOE), i.e., 2′-O—(CH₂)₂—O—(CH₂)₂—N(CH₃)₂. Further exemplary alternatives include: 5′-Me-2′-F nucleotides, 5′-Me-2′-OMe nucleotides, 5′-Me-2′-deoxynucleotides, (both R and S isomers in these three families); 2′-alkoxyalkyl; and 2′-NMA (N-methylacetamide).

[0244] Other alternatives include 2′-methoxy (2′-OCH₃), 2′-aminopropoxy (2′-OCH₂CH₂CH₂NH₂) and 2′-fluoro (2′-F). Similar modifications can be made at other positions on the nucleosides and nucleotides of an antisense oligonucleotide or dsRNA, particularly the 3′ position of the sugar on the 3′ terminal nucleotide or in 2′-5′ linked antisense oligonucleotides or dsRNAs and the 5′ position of 5′ terminal nucleotide. Antisense oligonucleotides or dsRNAs can have sugar mimetics such as cyclobutyl moieties in place of the pentofuranosyl sugar. Representative U.S. patents that teach the preparation of such modified sugar structures include, but are not limited to, U.S. Pat. Nos. 4,981,957; 5,118,800; 5,319,080; 5,359,044; 5,393,878; 5,446,137; 5,466,786; 5,514,785; 5,519,134; 5,567,811; 5,576,427; 5,591,722; 5,597,909; 5,610,300; 5,627,053; 5,639,873; 5,646,265; 5,658,873; 5,670,633; and 5,700,920, certain of which are commonly owned with the instant application. The entire contents of each of the foregoing are hereby incorporated herein by reference.

[0245] An antisense oligonucleotide or dsRNA can include nucleobase (often referred to in the art simply as “base”) alternatives (e.g., modifications or substitutions). Unmodified or natural nucleobases include the purine bases adenine (A) and guanine (G), and the pyrimidine bases thymine (T), cytosine (C) and uracil (U). Alternative nucleobases include other synthetic and natural nucleobases such as 5-methylcytidine, 5-hydroxymethylcytidine, 5-formylcytidine, 5-carboxycytidine, pyrrolocytidine, dideoxycytidine, uridine, 5-methoxyuridine, 5-hydroxydeoxyuridine, dihydrouridine, 4-thiourdine, pseudouridine, 1-methyl-pseudouridine, deoxyuridine, 5-hydroxybutynl-2′-deoxyuridine, xanthine, hypoxanthine, 7-deaza-xanthine, thienoguanine, 8-aza-7-deazaguanosine, 7-methylguanosine, 7-deazaguanosine, 6-aminomethyl-7-deazaguanosine, 8-aminoguanine, 2,2,7-trimethylguanosine, 8-methyladenine, 8-azidoadenine, 7-methyladenine, 7-deazaadenine, 3-deazaadenine, 2,6-diaminopurine, 2-aminopurine, 7-deaza-8-aza-adenine, 8-amino-adenine, thymine, dideoxythymine, 5-nitroindole, 2-aminoadenine, 6-methyl and other alkyl derivatives of adenine and guanine, 2-propyl and other alkyl derivatives of adenine and guanine, 2-thiouridine, 2-thiothymine and 2-thiocytosine, 5-halouracil and cytosine, 5-propynyl uridine and cytidine, 6-azo uridine, cytidine and thymine, 4-thiouridine, 8-halo, 8-amino, 8-thiol, 8-thioalkyl, 8-hydroxyl anal other 8-substituted adenines and guanines, 5-halo, particularly 5-bromo, 5-trifluoromethyl and other 5-substituted uridines and cytidines, 8-azaguanine and 8-azaadenine, and 3-deazaguanine. Further nucleobases include those disclosed in U.S. Pat. No. 3,687,808, those disclosed in Modified Nucleosides in Biochemistry, Biotechnology and Medicine, Herdewijn, P. ed. Wiley-VCH, 2008; those disclosed in The Concise Encyclopedia Of Polymer Science And Engineering, pages 858-859, Kroschwitz, J. L, ed. John Wiley & Sons, 1990, these disclosed by Englisch et al., (1991) Angewandte Chemie, International Edition, 30:613, and those disclosed by Sanghvi, Y S., Chapter 15, Antisense Research and Applications, pages 289-302, Crooke, S. T. and Lebleu, B., Ed., CRC Press, 1993. Certain of these nucleobases are particularly useful for increasing the binding affinity of the antisense oligonucleotides or dsRNAs. These include 5-substituted pyrimidines, 6-azapyrimidines, and N-2, N-6 and 0-6 substituted purines, including 2-aminopropyladenine, 5-propynyluracil, and 5-propynylcytosine. 5-methylcytosine substitutions have been shown to increase nucleic acid duplex stability by 0.6-1.2° C. (Sanghvi, Y. S., Crooke, S. T. and Lebleu, B., Eds., Antisense Research and Applications, CRC Press, Boca Raton, 1993, pp. 276-278) and are exemplary base substitutions, even more particularly when combined with 2′-O-methoxyethyl sugar modifications.

[0246] Representative U.S. patents that teach the preparation of certain of the above noted alternative nucleobases as well as other alternative nucleobases include, but are not limited to, the above noted U.S. Pat. Nos. 3,687,808, 4,845,205; 5,130,30; 5,134,066; 5,175,273; 5,367,066; 5,432,272; 5,457,187; 5,459,255; 5,484,908; 5,502,177; 5,525,711; 5,552,540; 5,587,469; 5,594,121, 5,596,091; 5,614,617; 5,681,941; 5,750,692; 6,015,886; 6,147,200; 6,166,197; 6,222,025; 6,235,887; 6,380,368; 6,528,640; 6,639,062; 6,617,438; 7,045,610; 7,427,672; and 7,495,088, the entire contents of each of which are hereby incorporated herein by reference.

[0247] In other aspects, the sugar moiety in the nucleotide can be a ribose molecule, optionally having a 2′-O-methyl, 2′-O-MOE, 2′-F, 2′-amino, 2′-O-propyl, 2′-aminopropyl, or 2′-OH modification.

[0248] An antisense oligonucleotide or dsRNA can include one or more bicyclic sugar moieties. A “bicyclic sugar” is a furanosyl ring modified by the bridging of two atoms. A “bicyclic nucleoside” (“BNA”) is a nucleoside having a sugar moiety comprising a bridge connecting two carbon atoms of the sugar ring, thereby forming a bicyclic ring system. In some aspects, the bridge connects the 4′-carbon and the 2′-carbon of the sugar ring. Thus, in some aspects an antisense oligonucleotide or dsRNA can include one or more locked nucleosides. A locked nucleoside is a nucleoside having a modified ribose moiety in which the ribose moiety comprises an extra bridge connecting the 2′ and 4′ carbons. In other words, a locked nucleoside is a nucleoside comprising a bicyclic sugar moiety comprising a 4′-CH₂—O-2′ bridge. This structure effectively “locks” the ribose in the 3′-endo structural conformation. The addition of locked nucleosides to antisense oligonucleotides or dsRNAs has been shown to increase antisense oligonucleotide or dsRNA stability in serum, and to reduce off-target effects (Elmen, J. et al., (2005) Nucleic Acids Research 33(1):439-447; Mook, O R. et al., (2007) Mol Canc Ther 6(3):833-843; Grunweller, A. et al., (2003) Nucleic Acids Research 31(12):3185-3193). Examples of bicyclic nucleosides for use in the polynucleotides include without limitation nucleosides comprising a bridge between the 4′ and the 2′ ribosyl ring atoms. In some aspects, the antisense polynucleotide agents include one or more bicyclic nucleosides comprising a 4′ to 2′ bridge. Examples of such 4′ to 2′ bridged bicyclic nucleosides, include but are not limited to 4′-(CH₂)—O-2′ (LNA); 4′-(CH₂)—S-2′; 4′-(CH₂)₂—O-2′ (ENA); 4′-CH(CH₃)—O-2′ (also referred to as “constrained ethyl” or “cEt”) and 4′-CH(CH₂OCH₃)—O-2′ (and analogs thereof; see, e.g., U.S. Pat. No. 7,399,845); 4′-C(CH₃)(CH₃)—O-2′ (and analogs thereof; see e.g., U.S. Pat. No. 8,278,283); 4′-CH₂—N(OCH₃)-2′ (and analogs thereof; see e.g., U.S. Pat. No. 8,278,425); 4′-CH₂—O—N(CH₃)₂-2′ (see, e.g., U.S. Patent Publication No. 2004/0171570); 4′-CH₂—N(R)—O-2′, wherein R is H, C1-C12 alkyl, ora protecting group (see, e.g., U.S. Pat. No. 7,427,672); 4′-CH₂—C(H)(CH₃)-2′ (see, e.g., Chattopadhyaya et al., J. Org. Chem., 2009, 74, 118-134); and 4′-CH₂—C(═CH₂)-2′ (and analogs thereof; see, e.g., U.S. Pat. No. 8,278,426). The entire contents of each of the foregoing are hereby incorporated herein by reference.

[0249] Additional representative U.S. Patents and US Patent Publications that teach the preparation of locked nucleic acid nucleotides include, but are not limited to, the following: U.S. Pat. Nos. 6,268,490; 6,525,191; 6,670,461; 6,770,748; 6,794,499; 6,998,484; 7,053,207; 7,034,133; 7,084,125; 7,399,845; 7,427,672; 7,569,686; 7,741,457; 8,022,193; 8,030,467; 8,278,425; 8,278,426; 8,278,283; US 2008/0039618; and US 2009/0012281, the entire contents of each of which are hereby incorporated herein by reference.

[0250] Any of the foregoing bicyclic nucleosides can be prepared having one or more stereochemical sugar configurations including for example α-L-ribofuranose and 13-D-ribofuranose (see WO 99/14226).

[0251] An antisense oligonucleotide or dsRNA can be modified to include one or more constrained ethyl nucleosides. As used herein, a “constrained ethyl nucleoside” or “cEt” is a locked nucleoside comprising a bicyclic sugar moiety comprising a 4′-CH(CH₃)—O-2′ bridge. In one aspect, a constrained ethyl nucleoside is in the S conformation referred to herein as “S-cEt.”

[0252] An antisense oligonucleotide or dsRNA can include one or more “conformationally restricted nucleosides” (“CRN”). CRN are nucleoside analogs with a linker connecting the C2′ and C4′ carbons of ribose or the C3 and —C5′ carbons of ribose. CRN lock the ribose ring into a stable conformation and increase the hybridization affinity to mRNA. The linker is of sufficient length to place the oxygen in an optimal position for stability and affinity resulting in less ribose ring puckering.

[0253] Representative publications that teach the preparation of certain of the above noted CRN include, but are not limited to, US Patent Publication No. 2013/0190383; and PCT publication WO 2013/036868, the entire contents of each of which are hereby incorporated herein by reference.

[0254] In some aspects, an antisense oligonucleotide or dsRNA comprises one or more monomers that are UNA (unlocked nucleoside) nucleosides. UNA is unlocked acyclic nucleoside, wherein any of the bonds of the sugar has been removed, forming an unlocked “sugar” residue. In one example, UNA also encompasses monomer with bonds between C1′-C4′ have been removed (i.e. the covalent carbon-oxygen-carbon bond between the C1′ and C4′ carbons). In another example, the C2′-C3′ bond (i.e. the covalent carbon-carbon bond between the C2′ and C3′ carbons) of the sugar has been removed (see Nuc. Acids Symp. Series, 52, 133-134 (2008) and Fluiter et al., Mol. Biosyst., 2009, 10, 1039 hereby incorporated by reference).

[0255] Representative U.S. publications that teach the preparation of UNA include, but are not limited to, U.S. Pat. No. 8,314,227; and US Patent Publication Nos. 2013/0096289; 2013/0011922; and 2011/0313020, the entire contents of each of which are hereby incorporated herein by reference.

[0256] The ribose molecule can be modified with a cyclopropane ring to produce a tricyclodeoxynucleic acid (tricyclo DNA). The ribose moiety can be substituted for another sugar such as 1,5,-anhydrohexitol, threose to produce a threose nucleoside (TNA), or arabinose to produce an arabino nucleoside. The ribose molecule can also be replaced with non-sugars such as cyclohexene to produce cyclohexene nucleoside or glycol to produce glycol nucleosides.

[0257] Potentially stabilizing modifications to the ends of nucleoside molecules can include N-(acetylaminocaproyl)-4-hydroxyprolinol (Hyp-C6-NHAc), N-(caproyl-4-hydroxyprolinol (Hyp-C6), N-(acetyl-4-hydroxyprolinol (Hyp-NHAc), thymidine-2′-O-deoxythymidine (ether), N-(aminocaproyl)-4-hydroxyprolinol (Hyp-C6-amino), 2-docosanoyl-uridine-3″-phosphate, inverted base dT(idT) and others. Disclosure of this modification can be found in PCT Publication No. WO 2011/005861.

[0258] Other alternatives chemistries of an antisense oligonucleotide or a dsRNA include a 5′ phosphate or 5′ phosphate mimic, e.g., a 5′-terminal phosphate or phosphate mimic of an antisense oligonucleotide or on the antisense strand of a dsRNA. Suitable phosphate mimics are disclosed in, for example US Patent Publication No. 2012/0157511, the entire contents of which are incorporated herein by reference.

[0259] Exemplary antisense oligonucleotides or dsRNA comprise nucleosides with alternative sugar moieties and can comprise DNA or RNA nucleosides. In some aspects, the antisense oligonucleotide or dsRNA comprises nucleosides comprising alternative sugar moieties and DNA nucleosides. Incorporation of alternative nucleosides into the antisense oligonucleotide or dsRNA can enhance the affinity of the antisense oligonucleotide or dsRNA for the target nucleic acid. In that case, the alternative nucleosides can be referred to as affinity enhancing alternative nucleotides.

[0260] In some aspects, the antisense oligonucleotide or dsRNA comprises at least 1 alternative nucleoside, such as at least 2, at least 3, at least 4, at least 5, at least 6, at least 7, at least 8, at least 9, at least 10, at least 11, at least 12, at least 13, at least 14, at least 15 or at least 16 alternative nucleosides. In other aspects, the antisense oligonucleotides or dsRNAs comprise from 1 to 10 alternative nucleosides, such as from 2 to 9 alternative nucleosides, such as from 3 to 8 alternative nucleosides, such as from 4 to 7 alternative nucleosides, such as 6 or 7 alternative nucleosides. In an aspect, the antisense oligonucleotide or dsRNA can comprise alternatives, which are independently selected from these three types of alternative (alternative sugar moiety, alternative nucleobase, and alternative internucleoside linkage), or a combination thereof. Preferably the oligonucleotide comprises one or more nucleosides comprising alternative sugar moieties, e.g., 2′ sugar alternative nucleosides. In some aspects, the antisense oligonucleotide or dsRNA comprises the one or more 2′ sugar alternative nucleoside independently selected from the group consisting of 2′-O-alkyl-RNA, 2′-O-methyl-RNA, 2′-alkoxy-RNA, 2′-O-methoxyethyl-RNA, 2′-amino-DNA, 2′-fluoro-DNA, arabino nucleic acid (ANA), 2′-fluoro-ANA, and BNA (e.g., LNA) nucleosides. In some aspects, the one or more alternative nucleoside is a BNA.

[0261] In some aspects, at least 1 of the alternative nucleosides is a BNA (e.g., an LNA), such as at least 2, such as at least 3, at least 4, at least 5, at least 6, at least 7, or at least 8 of the alternative nucleosides are BNAs. In a still further aspect, all the alternative nucleosides are BNAs.

[0262] In a further aspect, the antisense oligonucleotide or dsRNA comprises at least one alternative internucleoside linkage. In some aspects, the internucleoside linkages within the contiguous nucleotide sequence are phosphorothioate or boronophosphate internucleoside linkages. In some aspects, all the internucleotide linkages in the contiguous sequence of the antisense oligonucleotide or dsRNA are phosphorothioate linkages. In some aspects the phosphorothioate linkages are stereochemically pure phosphorothioate linkages. In some aspects, the phosphorothioate linkages are Sp phosphorothioate linkages. In other aspects, the phosphorothioate linkages are Rp phosphorothioate linkages.

[0263] In some aspects, the antisense oligonucleotide or dsRNA comprises at least one alternative nucleoside which is a 2′-MOE-RNA, such as 2, 3, 4, 5, 6, 7, 8, 9, or 10 2′-MOE-RNA nucleoside units. In some aspects, the 2′-MOE-RNA nucleoside units are connected by phosphorothioate linkages. In some aspects, at least one of said alternative nucleoside is 2′-fluoro DNA, such as 2, 3, 4, 5, 6, 7, 8, 9, or 10 2′-fluoro-DNA nucleoside units. In some aspects, the antisense oligonucleotide or dsRNA comprises at least one BNA unit and at least one 2′ substituted modified nucleoside. In some aspects, the antisense oligonucleotide or dsRNA comprises both 2′ sugar modified nucleosides and DNA units. In some aspects, the antisense oligonucleotide or contiguous nucleotide region thereof is a gapmer oligonucleotide.

[0264] D. Antisense Oligonucleotides or dsRNAs Conjugated to Ligands

[0265] Antisense oligonucleotides or dsRNAs can be chemically linked to one or more ligands, moieties, or conjugates that enhance the activity, cellular distribution, or cellular uptake of the antisense oligonucleotide or dsRNA. Such moieties include but are not limited to lipid moieties such as a cholesterol moiety (Letsinger et al., (1989) Proc. Natl. Acid. Sci. USA, 86: 6553-6556), cholic acid (Manoharan et al., (1994) Biorg. Med. Chem. Let., 4:1053-1060), a thioether, e.g., beryl-S-tritylthiol (Manoharan et al., (1992) Ann. N.Y. Acad. Sci., 660:306-309; Manoharan et al., (1993) Biorg. Med. Chem. Let., 3:2765-2770), a thiocholesterol (Oberhauser et al., (1992) Nucl. Acids Res., 20:533-538), an aliphatic chain, e.g., dodecandiol or undecyl residues (Saison-Behmoaras et al., (1991) EMBO J, 10:1111-1118; Kabanov et al., (1990) FEBS Lett., 259:327-330; Svinarchuk et al., (1993) Biochimie, 75:49-54), a phospholipid, e.g., di-hexadecyl-rac-glycerol or triethyl-ammonium 1,2-di-O-hexadecyl-rac-glycero-3-phosphonate (Manoharan et al., (1995) Tetrahedron Lett., 36:3651-3654; Shea et al., (1990) Nucl. Acids Res., 18:3777-3783), a polyamine or a polyethylene glycol chain (Manoharan et al., (1995) Nucleosides & Nucleotides, 14:969-973), or adamantane acetic acid (Manoharan et al., (1995) Tetrahedron Lett., 36:3651-3654), a palmityl moiety (Mishra et al., (1995) Biochim. Biophys. Acta, 1264:229-237), or an octadecylamine or hexylamino-carbonyloxycholesterol moiety (Crooke et al., (1996) J. Pharmacol. Exp. Ther., 277:923-937).

[0266] In one aspect, a ligand alters the distribution, targeting, or lifetime of an antisense oligonucleotide or dsRNA agent into which it is incorporated. In some aspects, a ligand provides an enhanced affinity for a selected target, e.g., molecule, cell or cell type, compartment, e.g., a cellular or organ compartment, tissue, organ, or region of the body, as, e.g., compared to a species absent such a ligand. Some ligands will not take part in duplex pairing in a duplexed nucleic acid.

[0267] Ligands can include a naturally occurring substance, such as a protein (e.g., human serum albumin (HSA), low-density lipoprotein (LDL), or globulin); carbohydrate (e.g., a dextran, pullulan, chitin, chitosan, inulin, cyclodextrin, N-acetylglucosamine, N-acetylgalactosamine, or hyaluronic acid); or a lipid. The ligand can be a recombinant or synthetic molecule, such as a synthetic polymer, e.g., a synthetic polyamino acid. Examples of polyamino acids include polyamino acid is a polylysine (PLL), poly L-aspartic acid, poly L-glutamic acid, styrene-maleic acid anhydride copolymer, poly(L-lactide-co-glycolied) copolymer, divinyl ether-maleic anhydride copolymer, N-(2-hydroxypropyl)methacrylamide copolymer (HMPA), polyethylene glycol (PEG), polyvinyl alcohol (PVA), polyurethane, poly(2-ethylacryllic acid), N-isopropylacrylamide polymers, or polyphosphazine. Example of polyamines include: polyethylenimine, polylysine (PLL), spermine, spermidine, polyamine, pseudopeptide-polyamine, peptidomimetic polyamine, dendrimer polyamine, arginine, amidine, protamine, cationic lipid, cationic porphyrin, quaternary salt of a polyamine, or an alpha helical peptide.

[0268] Ligands can include targeting groups, e.g., a cell or tissue targeting agent, e.g., a lectin, glycoprotein, lipid or protein, e.g., an antibody, that binds to a specified cell type such as a kidney cell. A targeting group can be a thyrotropin, melanotropin, lectin, glycoprotein, surfactant protein A, Mucin carbohydrate, multivalent lactose, multivalent galactose, N-acetyl-galactosamine, N-acetyl-gulucosamine multivalent mannose, multivalent fucose, glycosylated polyaminoacids, multivalent galactose, transferrin, bisphosphonate, polyglutamate, polyaspartate, a lipid, cholesterol, a steroid, bile acid, folate, vitamin B12, vitamin A, biotin, or an RGD peptide or RGD peptide mimetic. Other examples of ligands include dyes, intercalating agents (e.g. acridines), cross-linkers (e.g. psoralen, mitomycin C), porphyrins (TPPC4, texaphyrin, Sapphyrin), polycyclic aromatic hydrocarbons (e.g., phenazine, dihydrophenazine), artificial endonucleases (e.g. EDTA), lipophilic molecules, e.g., cholesterol, cholic acid, adamantane acetic acid, 1-pyrene butyric acid, dihydrotestosterone, 1,3-Bis-O(hexadecyl)glycerol, geranyloxyhexyl group, hexadecylglycerol, borneol, menthol, 1,3-propanediol, heptadecyl group, palmitic acid, myristic acid, O3-(oleoyl)lithocholic acid, O3-(oleoyl)cholenic acid, dimethoxytrityl, or phenoxazine) and peptide conjugates (e.g., antennapedia peptide, Tat peptide), alkylating agents, phosphate, amino, mercapto, PEG (e.g., PEG-40K), MPEG, [MPEG]2, polyamino, alkyl, substituted alkyl, radiolabeled markers, enzymes, haptens (e.g. biotin), transport/absorption facilitators (e.g., aspirin, vitamin E, folic acid), synthetic ribonucleases (e.g., imidazole, bisimidazole, histamine, imidazole clusters, acridine-imidazole conjugates, Eu3+ complexes of tetraazamacrocycles), dinitrophenyl, HRP, or AP.

[0269] Ligands can be proteins, e.g., glycoproteins, or peptides, e.g., molecules having a specific affinity for a co-ligand, or antibodies e.g., an antibody, that binds to a specified cell type such as a hepatic cell. Ligands can include hormones and hormone receptors. They can include non-peptidic species, such as lipids, lectins, carbohydrates, vitamins, cofactors, multivalent lactose, multivalent galactose, N-acetyl-galactosamine, N-acetyl-gulucosamine multivalent mannose, or multivalent fucose.

[0270] The ligand can be a substance, e.g., a drug, which can increase the uptake of the antisense oligonucleotide or dsRNA agent into the cell, for example, by disrupting the cell's cytoskeleton, e.g., by disrupting the cell's microtubules, microfilaments, and/or intermediate filaments. The drug can be, for example, taxon, vincristine, vinblastine, cytochalasin, nocodazole, japlakinolide, latrunculin A, phalloidin, swinholide A, indanocine, or myoservin.

[0271] In some aspects, a ligand attached to an antisense oligonucleotide or dsRNA as described herein acts as a pharmacokinetic modulator (PK modulator). PK modulators include lipophiles, bile acids, steroids, phospholipid analogues, peptides, protein binding agents, PEG, vitamins etc. Exemplary PK modulators include, but are not limited to, cholesterol, fatty acids, cholic acid, lithocholic acid, dialkylglycerides, diacylglyceride, phospholipids, sphingolipids, naproxen, ibuprofen, vitamin E, biotin etc. Antisense nucleotides or dsRNAs that comprise a number of phosphorothioate linkages are also known to bind to serum protein, thus short antisense oligonucleotides or dsRNAs, e.g., antisense oligonucleotides or dsRNAs of about 5 bases, 10 bases, 15 bases, or 20 bases, comprising multiple of phosphorothioate linkages in the backbone are also amenable as ligands (e.g. as PK modulating ligands). In addition, aptamers that bind serum components (e.g. serum proteins) are also suitable for use as PK modulating ligands in the aspects described herein.

[0272] Ligand-conjugated antisense oligonucleotides or dsRNAs can be synthesized by the use of an antisense oligonucleotide or dsRNA that bears a pendant reactive functionality, such as that derived from the attachment of a linking molecule onto the antisense oligonucleotide or dsRNA (described below). This reactive antisense oligonucleotide or dsRNA can be reacted directly with commercially-available ligands, ligands that are synthesized bearing any of a variety of protecting groups, or ligands that have a linking moiety attached thereto.

[0273] The antisense oligonucleotides or dsRNA used in the conjugates can be conveniently and routinely made through the well-known technique of solid-phase synthesis. Equipment for such synthesis is sold by several vendors including, for example, Applied Biosystems (Foster City, Calif.). Any other means for such synthesis known in the art can additionally or alternatively be employed. It is also known to use similar techniques to prepare other antisense oligonucleotides or dsRNAs, such as the phosphorothioates and alkylated derivatives.

[0274] In the ligand-conjugated antisense oligonucleotides or dsRNAs, such as the ligand-molecule bearing sequence-specific linked nucleosides, the oligonucleotides and oligonucleosides can be assembled on a suitable DNA synthesizer utilizing standard nucleotide or nucleoside precursors, or nucleotide or nucleoside conjugate precursors that already bear the linking moiety, ligand-nucleotide or nucleoside-conjugate precursors that already bear the ligand molecule, or non-nucleoside ligand-bearing building blocks.

[0275] When using conjugate precursors that already bear a linking moiety, the synthesis of the sequence-specific linked nucleosides is typically completed, and the ligand molecule is then reacted with the linking moiety to form the ligand-conjugated antisense oligonucleotide or dsRNA. In some aspects, the antisense oligonucleotides or dsRNAs are synthesized by an automated synthesizer using phosphoramidites derived from ligand-nucleoside conjugates in addition to the standard phosphoramidites and non-standard phosphoramidites that are commercially available and routinely used in oligonucleotide synthesis.

[0276] i. Lipid Conjugates

[0277] In one aspect, the ligand or conjugate is a lipid or lipid-based molecule. Such a lipid or lipid-based molecule can bind a serum protein, e.g., human serum albumin (HSA). An HSA binding ligand allows for distribution of the conjugate to a target tissue, e.g., a non-kidney target tissue of the body. A lipid or lipid-based ligand can (a) increase resistance to degradation of the conjugate, (b) increase targeting or transport into a target cell or cell membrane, and/or (c) can be used to adjust binding to a serum protein, e.g., HSA.

[0278] In another aspect, the ligand is a moiety, e.g., a vitamin, which is taken up by a target cell, e.g., a proliferating cell. Exemplary vitamins include vitamin A, E, and K.

[0279] ii. Cell Permeation Agents

[0280] In another aspect, the ligand is a cell-permeation agent, such a helical cell-permeation agent. In one aspect, the agent is amphipathic. An exemplary agent is a peptide such as tat or antennopedia. If the agent is a peptide, it can be modified, including a peptidylmimetic, invertomers, non-peptide or pseudo-peptide linkages, and use of D-amino acids. In one aspect, the helical agent is an alpha-helical agent which can have a lipophilic and a lipophobic phase.

[0281] The ligand can be a peptide or peptidomimetic. A peptidomimetic (also referred to herein as an oligopeptidomimetic) is a molecule capable of folding into a defined three-dimensional structure similar to a natural peptide. The attachment of peptide and peptidomimetics to antisense oligonucleotide or dsRNA agents can affect pharmacokinetic distribution of the antisense oligonucleotide or dsRNA, such as by enhancing cellular recognition and absorption. The peptide or peptidomimetic moiety can be about 5-50 amino acids long, e.g., about 5, 10, 15, 20, 25, 30, 35, 40, 45, or 50 amino acids long.

[0282] A peptide or peptidomimetic can be, for example, a cell permeation peptide, cationic peptide, amphipathic peptide, or hydrophobic peptide (e.g., consisting primarily of Tyr, Trp, or Phe). The peptide moiety can be a dendrimer peptide, constrained peptide or crosslinked peptide. In another alternative, the peptide moiety can include a hydrophobic membrane translocation sequence (MTS). An exemplary hydrophobic MTS-containing peptide is RFGF having the amino acid sequence AAVALLPAVLLALLAP. An RFGF analogue (e.g., amino acid sequence AALLPVLLAAP containing a hydrophobic MTS can be a targeting moiety. The peptide moiety can be a “delivery” peptide, which can carry large polar molecules including peptides, oligonucleotides, and protein across cell membranes. For example, sequences from the HIV Tat protein (GRKKRRQRRRPPQ and the Drosophila Antennapedia protein (RQIKIWFQNRRMKWKK have been found to be capable of functioning as delivery peptides. A peptide or peptidomimetic can be encoded by a random sequence of DNA, such as a peptide identified from a phage-display library, or one-bead-one-compound (OBOC) combinatorial library (Lam et al., Nature, 354:82-84, 1991). Examples of a peptide or peptidomimetic tethered to an antisense oligonucleotide or dsRNA agent via an incorporated monomer unit for cell targeting purposes is an arginine-glycine-aspartic acid (RGD)-peptide, or RGD mimic. A peptide moiety can range in length from about 5 amino acids to about 40 amino acids. The peptide moieties can have a structural modification, such as to increase stability or direct conformational properties. Any of the structural modifications described below can be utilized.

[0283] An RGD peptide for use in the compositions and methods described herein can be linear or cyclic, and can be modified, e.g., glycosylated or methylated, to facilitate targeting to a specific tissue(s). RGD-containing peptides and peptidiomimemtics can include D-amino acids, as well as synthetic RGD mimics. In addition to RGD, one can use other moieties that target the integrin ligand. Some conjugates of this ligand target PECAM-1 or VEGF.

[0284] A cell permeation peptide is capable of permeating a cell, e.g., a microbial cell, such as a bacterial or fungal cell, or a mammalian cell, such as a human cell. A microbial cell-permeating peptide can be, for example, an α-helical linear peptide (e.g., LL-37 or Ceropin P1), a disulfide bond-containing peptide (e.g., α-defensin, β-defensin, or bactenecin), or a peptide containing only one or two dominating amino acids (e.g., PR-39 or indolicidin). A cell permeation peptide can include a nuclear localization signal (NLS). For example, a cell permeation peptide can be a bipartite amphipathic peptide, such as MPG, which is derived from the fusion peptide domain of HIV-1 gp41 and the NLS of SV40 large T antigen (Simeoni et al., Nucl. Acids Res. 31:2717-2724, 2003).

[0285] iii. Carbohydrate Conjugates

[0286] In some aspects of the compositions and methods described herein, an antisense oligonucleotide or dsRNA further comprises a carbohydrate. The carbohydrate conjugated antisense oligonucleotides are advantageous for the in vivo delivery of nucleic acids, as well as compositions suitable for in vivo therapeutic use, as described herein. As used herein, “carbohydrate” refers to a compound which is either a carbohydrate per se made up of one or more monosaccharide units having at least 6 carbon atoms (which can be linear, branched or cyclic) with an oxygen, nitrogen or sulfur atom bonded to each carbon atom; or a compound having as a part thereof a carbohydrate moiety made up of one or more monosaccharide units each having at least six carbon atoms (which can be linear, branched or cyclic), with an oxygen, nitrogen or sulfur atom bonded to each carbon atom. Representative carbohydrates include the sugars (mono-, di-, tri- and oligosaccharides containing from about 4, 5, 6, 7, 8, or 9 monosaccharide units), and polysaccharides such as starches, glycogen, cellulose and polysaccharide gums. Specific monosaccharides include C5 and above (e.g., C5, C6, C7, or C8) sugars; di- and trisaccharides include sugars having two or three monosaccharide units (e.g., C5, C6, C7, or C8).

[0287] In one aspect, a carbohydrate conjugate for use in the compositions and methods described herein is a monosaccharide.

[0288] In some aspects, the carbohydrate conjugate further comprises one or more additional ligands as described above, such as, but not limited to, a PK modulator and/or a cell permeation peptide.

[0289] Additional carbohydrate conjugates (and linkers) suitable for use include those described in PCT Publication Nos. WO 2014/179620 and WO 2014/179627, the entire contents of each of which are incorporated herein by reference.

[0290] iv. Linkers

[0291] In some aspects, the conjugate or ligand described herein can be attached to an antisense oligonucleotide or a dsRNA with various linkers that can be cleavable or non-cleavable.

[0292] Linkers typically comprise a direct bond or an atom such as oxygen or sulfur, a unit such as NR⁸, C(O), C(O)NH, SO, SO₂, SO₂NH or a chain of atoms, such as, but not limited to, substituted or unsubstituted alkyl, substituted or unsubstituted alkenyl, substituted or unsubstituted alkynyl, arylalkyl, arylalkenyl, arylalkynyl, heteroarylalkyl, heteroarylalkenyl, heteroarylalkynyl, heterocyclylalkyl, heterocyclylalkenyl, heterocyclylalkynyl, aryl, heteroaryl, heterocyclyl, cycloalkyl, cycloalkenyl, alkylarylalkyl, alkylarylalkenyl, alkylarylalkynyl, alkenylarylalkyl, alkenylarylalkenyl, alkenylarylalkynyl, alkynylarylalkyl, alkynylarylalkenyl, alkynylarylalkynyl, alkylheteroarylalkyl, alkylheteroarylalkenyl, alkylheteroarylalkynyl, alkenylheteroarylalkyl, alkenylheteroarylalkenyl, alkenylheteroarylalkynyl, alkynylheteroarylalkyl, alkynylheteroarylalkenyl, alkynylheteroarylalkynyl, alkylheterocyclylalkyl, alkylheterocyclylalkenyl, alkylhererocyclylalkynyl, alkenylheterocyclylalkyl, alkenylheterocyclylalkenyl, alkenylheterocyclylalkynyl, alkynylheterocyclylalkyl, alkynylheterocyclylalkenyl, alkynylheterocyclylalkynyl, alkylaryl, alkenylaryl, alkynylaryl, alkylheteroaryl, alkenylheteroaryl, alkynylhereroaryl, which one or more methylenes can be interrupted or terminated by O, S, S(O), SO₂, N(R⁸), C(O), substituted or unsubstituted aryl, substituted or unsubstituted heteroaryl, substituted or unsubstituted heterocyclic; where R⁸ is hydrogen, acyl, aliphatic or substituted aliphatic. In one aspect, the linker is between about 1-24, 2-24, 3-24, 4-24, 5-24, 6-24, 6-18, 7-18, 8-18, 7-17, 8-17, 6-16, 7-17, 8-16 or 1, 2, 3, 4 5, 6, 7, 8, 9, 10, 11, 12, 13, 14, 1516, 17, 18, 19, 20, 21, 22 23, or 24 atoms.

[0293] A cleavable linking group is one which is sufficiently stable outside the cell, but which upon entry into a target cell is cleaved to release the two parts the linker is holding together. In some aspects, the cleavable linking group is cleaved at least about 10 times, 20 times, 30 times, 40 times, 50 times, 60 times, 70 times, 80 times, 90 times, or more, or at least about 100 times faster in a target cell or under a first reference condition (which can, e.g., be selected to mimic or represent intracellular conditions) than in the blood of a subject, or under a second reference condition (which can, e.g., be selected to mimic or represent conditions found in the blood or serum).

[0294] Cleavable linking groups are susceptible to cleavage agents, e.g., pH, redox potential, or the presence of degradative molecules. Generally, cleavage agents are more prevalent or found at higher levels or activities inside cells than in serum or blood. Examples of such degradative agents include: redox agents which are selective for particular substrates or which have no substrate specificity, including, e.g., oxidative or reductive enzymes or reductive agents such as mercaptans, present in cells, that can degrade a redox cleavable linking group by reduction; esterases; endosomes or agents that can create an acidic environment, e.g., those that result in a pH of five or lower; enzymes that can hydrolyze or degrade an acid cleavable linking group by acting as a general acid, peptidases (which can be substrate specific), and phosphatases.

[0295] A cleavable linkage group, such as a disulfide bond can be susceptible to pH. The pH of human serum is 7.4, while the average intracellular pH is slightly lower, ranging from about 7.1-7.3. Endosomes have a more acidic pH, in the range of 5.5-6.0, and lysosomes have an even more acidic pH at around 5.0. Some linkers will have a cleavable linking group that is cleaved at a preferred pH, thereby releasing a cationic lipid from the ligand inside the cell, or into the desired compartment of the cell.

[0296] A linker can include a cleavable linking group that is cleavable by a particular enzyme. The type of cleavable linking group incorporated into a linker can depend on the cell to be targeted. For example, a liver-targeting ligand can be linked to a cationic lipid through a linker that includes an ester group. Liver cells are rich in esterases, and therefore the linker will be cleaved more efficiently in liver cells than in cell types that are not esterase-rich. Other cell-types rich in esterases include cells of the lung, renal cortex, and testis.

[0297] Linkers that contain peptide bonds can be used when targeting cell types rich in peptidases, such as liver cells and synoviocytes.

[0298] In general, the suitability of a candidate cleavable linking group can be evaluated by testing the ability of a degradative agent (or condition) to cleave the candidate linking group. It will also be desirable to test the candidate cleavable linking group for the ability to resist cleavage in the blood or when in contact with other non-target tissue. Thus, one can determine the relative susceptibility to cleavage between at least two conditions, where at least one condition is selected to be indicative of cleavage in a target cell and another condition is selected to be indicative of cleavage in other tissues or biological fluids, e.g., blood or serum. The evaluations can be carried out in cell free systems, in cells, in cell culture, in organ or tissue culture, or in whole animals. It can be useful to make initial evaluations in cell-free or culture conditions and to confirm by further evaluations in whole animals. In some aspects, useful candidate compounds are cleaved at least about 2, 4, 10, 20, 30, 40, 50, 60, 70, 80, 90, or 100 times faster in the cell (or under in vitro conditions selected to mimic intracellular conditions) as compared to blood or serum (or under in vitro conditions selected to mimic extracellular conditions).

[0299] a. Redox Cleavable Linking Groups

[0300] In one aspect, a cleavable linking group is a redox cleavable linking group that is cleaved upon reduction or oxidation. An example of reductively cleavable linking group is a disulphide linking group (—S—S—). To determine if a candidate cleavable linking group is a suitable “reductively cleavable linking group,” or for example is suitable for use with a particular antisense oligonucleotide or dsRNA moiety and particular targeting agent one can look to methods described herein. For example, a candidate can be evaluated by incubation with dithiothreitol (DTT), or other reducing agent using reagents know in the art, which mimic the rate of cleavage which would be observed in a cell, e.g., a target cell. The candidates can be evaluated under conditions which are selected to mimic blood or serum conditions. In one aspect, candidate compounds are cleaved by at most about 10% in the blood. In other aspects, useful candidate compounds are degraded at least about 2, 4, 10, 20, 30, 40, 50, 60, 70, 80, 90, or 100 times faster in the cell (or under in vitro conditions selected to mimic intracellular conditions) as compared to blood (or under in vitro conditions selected to mimic extracellular conditions). The rate of cleavage of candidate compounds can be determined using standard enzyme kinetics assays under conditions chosen to mimic intracellular media and compared to conditions chosen to mimic extracellular media.

[0301] b. Phosphate-Based Cleavable Linking Groups

[0302] In another aspect, a cleavable linker comprises a phosphate-based cleavable linking group. A phosphate-based cleavable linking group is cleaved by agents that degrade or hydrolyze the phosphate group. An example of an agent that cleaves phosphate groups in cells are enzymes such as phosphatases in cells. Examples of phosphate-based linking groups are —O—P(O)(OR^{k})—O—, —O—P(S)(OR^{k})—O—, —O—P(S)(SR^{k})—O—, —S—P(O)(OR^{k})—O—, —O—P(O)(OR^{k})—S—, —S—P(O)(OR^{k})—S—, —O—P(S)(OR^{k})—S—, —S—P(S)(OR^{k})—O—, —O—P(O)(R^{k})—O—, —O—P(S)(R^{k})—O—, —S—P(O)(R^{k})—O—, —S—P(S)(R^{k})—O—, —S—P(O)(R^{k})—S—, —O—P(S)(R^{k})—S—. These candidates can be evaluated using methods analogous to those described above.

[0303] c. Acid Cleavable Linking Groups

[0304] In another aspect, a cleavable linker comprises an acid cleavable linking group. An acid cleavable linking group is a linking group that is cleaved under acidic conditions. In some aspects, acid cleavable linking groups are cleaved in an acidic environment with a pH of about 6.5 or lower (e.g., about 6.0, 5.75, 5.5, 5.25, 5.0, or lower), or by agents such as enzymes that can act as a general acid. In a cell, specific low pH organelles, such as endosomes and lysosomes can provide a cleaving environment for acid cleavable linking groups. Examples of acid cleavable linking groups include but are not limited to hydrazones, esters, and esters of amino acids. Acid cleavable groups can have the general formula —C═NN—, C(O)O, or —OC(O). In one aspect, the carbon is attached to the oxygen of the ester (the alkoxy group) is an aryl group, substituted alkyl group, or tertiary alkyl group such as dimethyl pentyl or t-butyl. These candidates can be evaluated using methods analogous to those described above.

[0305] d. Ester-Based Linking Groups

[0306] In another aspect, a cleavable linker comprises an ester-based cleavable linking group. An ester-based cleavable linking group is cleaved by enzymes such as esterases and amidases in cells. Examples of ester-based cleavable linking groups include but are not limited to esters of alkylene, alkenylene and alkynylene groups. Ester cleavable linking groups have the general formula —C(O)O—, or —OC(O)—. These candidates can be evaluated using methods analogous to those described above.

[0307] e. Peptide-Based Cleaving Groups

[0308] In yet another aspect, a cleavable linker comprises a peptide-based cleavable linking group. A peptide-based cleavable linking group is cleaved by enzymes such as peptidases and proteases in cells. Peptide-based cleavable linking groups are peptide bonds formed between amino acids to yield oligopeptides (e.g., dipeptides, tripeptides etc.) and polypeptides. Peptide-based cleavable groups do not include the amide group (—C(O)NH—). The amide group can be formed between any alkylene, alkenylene, or alkynelene. A peptide bond is a special type of amide bond formed between amino acids to yield peptides and proteins. The peptide based cleavage group is generally limited to the peptide bond (i.e., the amide bond) formed between amino acids yielding peptides and proteins and does not include the entire amide functional group. Peptide-based cleavable linking groups have the general formula —NHCHR^{A}C(O)NHCHR^{B}C(O)—, where RA and RB are the R groups of the two adjacent amino acids. These candidates can be evaluated using methods analogous to those described above.

[0309] In one aspect, an oligonucleotide or dsRNA is conjugated to a carbohydrate through a linker. Linkers include bivalent and trivalent branched linker groups. Linkers for antisense oligonucleotide or dsRNA carbohydrate conjugates include, but are not limited to, those described in formulas 24-35 of PCT Publication No. WO 2018/195165.

[0310] Representative U.S. patents that teach the preparation of antisense oligonucleotide or dsRNA conjugates include, but are not limited to, U.S. Pat. Nos. 4,828,979; 4,948,882; 5,218,105; 5,525,465; 5,541,313; 5,545,730; 5,552,538; 5,578,717, 5,580,731; 5,591,584; 5,109,124; 5,118,802; 5,138,045; 5,414,077; 5,486,603; 5,512,439; 5,578,718; 5,608,046; 4,587,044; 4,605,735; 4,667,025; 4,762,779; 4,789,737; 4,824,941; 4,835,263; 4,876,335; 4,904,582; 4,958,013; 5,082,830; 5,112,963; 5,214,136; 5,082,830; 5,112,963; 5,214,136; 5,245,022; 5,254,469; 5,258,506; 5,262,536; 5,272,250; 5,292,873; 5,317,098; 5,371,241, 5,391,723; 5,416,203, 5,451,463; 5,510,475; 5,512,667; 5,514,785; 5,565,552; 5,567,810; 5,574,142; 5,585,481; 5,587,371; 5,595,726; 5,597,696; 5,599,923; 5,599,928 and 5,688,941; 6,294,664; 6,320,017; 6,576,752; 6,783,931; 6,900,297; 7,037,646; 8,106,022, the entire contents of each of which are hereby incorporated herein by reference.

[0311] It is not necessary for all positions in a given compound to be uniformly modified, and in fact more than one of the aforementioned modifications can be incorporated in a single compound or even at a single nucleoside within an antisense oligonucleotide or dsRNA. Antisense oligonucleotide or dsRNA compounds that are chimeric compounds are also contemplated. Chimeric antisense oligonucleotides or chimeric dsRNAs typically contain at least one region wherein the RNA is modified so as to confer upon the antisense oligonucleotide or dsRNA increased resistance to nuclease degradation, increased cellular uptake, and/or increased binding affinity for the target nucleic acid. An additional region of the antisense oligonucleotide or dsRNA can serve as a substrate for enzymes capable of cleaving RNA:DNA or RNA:RNA hybrids. By way of example, RNase H is a cellular endonuclease which cleaves the RNA strand of an RNA:DNA duplex. Activation of RNase H, therefore, results in cleavage of the RNA target, thereby greatly enhancing the efficiency of antisense oligonucleotide inhibition or dsRNA reduction of gene expression. Consequently, comparable results can often be obtained with shorter antisense oligonucleotides or dsRNAs when chimeric antisense oligonucleotides or chimeric dsRNAs are used, compared to phosphorothioate deoxy antisense oligonucleotides or dsRNAs hybridizing to the same target region. Cleavage of the RNA target can be routinely detected by gel electrophoresis and, if necessary, associated nucleic acid hybridization techniques known in the art.

[0312] In some instances, the nucleotides of an antisense oligonucleotide or nucleosides of a dsRNA can be modified by a non-ligand group. A number of non-ligand molecules have been conjugated to antisense oligonucleotides or dsRNAs to enhance the activity, cellular distribution, or cellular uptake of the antisense oligonucleotide or dsRNA, and procedures for performing such conjugations are available in the scientific literature. Such non-ligand moieties have included lipid moieties, such as cholesterol (Kubo, T. et al., Biochem. Biophys. Res. Comm, 2007, 365(1):54-61; Letsinger et al., Proc. Natl. Acad. Sci. USA, 1989, 86:6553), cholic acid (Manoharan et al., Bioorg. Med. Chem. Lett., 1994, 4:1053), a thioether, e.g., hexyl-S-tritylthiol (Manoharan et al., Ann. N.Y. Acad. Sci., 1992, 660:306; Manoharan et al., Bioorg. Med. Chem. Let., 1993, 3:2765), a thiocholesterol (Oberhauser et al., Nucl. Acids Res., 1992, 20:533), an aliphatic chain, e.g., dodecandiol or undecyl residues (Saison-Behmoaras et al., EMBO J., 1991, 10:111; Kabanov et al., FEBS Lett., 1990, 259:327; Svinarchuk et al., Biochimie, 1993, 75:49), a phospholipid, e.g., di-hexadecyl-rac-glycerol or triethylammonium 1,2-di-O-hexadecyl-rac-glycero-3-H-phosphonate (Manoharan et al., Tetrahedron Lett., 1995, 36:3651; Shea et al., Nucl. Acids Res., 1990, 18:3777), a polyamine or a polyethylene glycol chain (Manoharan et al., Nucleosides & Nucleotides, 1995, 14:969), or adamantane acetic acid (Manoharan et al., Tetrahedron Lett., 1995, 36:3651), a palmityl moiety (Mishra et al., Biochim. Biophys. Acta, 1995, 1264:229), or an octadecylamine or hexylamino-carbonyl-oxycholesterol moiety (Crooke et al., J. Pharmacol. Exp. Ther., 1996, 277:923). Representative United States patents that teach the preparation of such antisense oligonucleotide or dsRNA conjugates have been listed above. Typical conjugation protocols involve the synthesis of an antisense oligonucleotide or dsRNA bearing an aminolinker at one or more positions of the sequence. The amino group is then reacted with the molecule being conjugated using appropriate coupling or activating reagents. The conjugation reaction can be performed either with the antisense oligonucleotide or dsRNA still bound to the solid support or following cleavage of the antisense oligonucleotide or dsRNA, in solution phase. Purification of the antisense oligonucleotide or dsRNA conjugate by HPLC typically affords the pure conjugate.

### IV. Pharmaceutical Uses

[0313] The antisense oligonucleotide or dsRNA compositions described herein are useful in the methods described herein and, while not bound by theory, are believed to exert their desirable effects through their ability to modulate the level, status, and/or activity of a MutLa heterodimer comprising MLH1, e.g., by inhibiting or reducing the activity or level of the MLH1 protein in a cell in a mammal.

[0314] An aspect relates to methods of treating disorders related to DNA mismatch repair such as trinucleotide repeat expansion disorders in a subject in need thereof. Another aspect includes reducing the level of MLH1 in a cell of a subject identified as having a trinucleotide repeat expansion disorder. Still another aspect includes a method of inhibiting or reducing expression of MLH1 in a cell in a subject. Further aspects include methods of decreasing trinucleotide repeat expansion in a cell. The methods include contacting a cell with an antisense oligonucleotide or dsRNA, in an amount effective to inhibit or reduce expression of MLH1 in the cell, thereby inhibiting or reducing expression of MLH1 in the cell.

[0315] Based on the above methods, an antisense oligonucleotide or dsRNA, or a composition comprising such an antisense oligonucleotide or dsRNA, for use in therapy, or for use as a medicament, or for use in treating disorders related to DNA mismatch repair such as trinucleotide repeat expansion disorders in a subject in need thereof, or for use in reducing the level of MLH1 in a cell of a subject identified as having a trinucleotide repeat expansion disorder, or for use in inhibiting or reducing expression of MLH1 in a cell in a subject, or for use in decreasing trinucleotide repeat expansion in a cell is contemplated. The uses include the contacting of a cell with the antisense oligonucleotide or dsRNA, in an amount effective to inhibit or reduce expression of MLH1 in the cell, thereby inhibiting or reducing expression of MLH1 in the cell. Aspects described below in relation to the methods described herein are also applicable to these further aspects.

[0316] Contacting of a cell with an antisense oligonucleotide or dsRNA can be done in vitro or in vivo. Contacting a cell in vivo with the antisense oligonucleotide or dsRNA includes contacting a cell or group of cells within a subject, e.g., a human subject, with the antisense oligonucleotide or dsRNA. Combinations of in vitro and in vivo methods of contacting a cell are also possible. Contacting a cell can be direct or indirect, as discussed above. Furthermore, contacting a cell can be accomplished via a targeting ligand, including any ligand described herein or known in the art. In some aspects, the targeting ligand is a carbohydrate moiety, e.g., a GalNAc3 ligand, or any other ligand that directs the antisense oligonucleotide or dsRNA to a site of interest. Cells can include those of the central nervous system, or muscle cells.

[0317] Inhibiting or reducing expression of MLH1 includes any level of inhibition or reduction of MLH1, e.g., at least partial suppression of the expression of MLH1, such as an inhibition or reduction by at least about 20%. In some aspects, inhibition or reduction is by at least about 25%, at least about 30%, at least about 35%, at least about 40%, at least about 45%, at least about 50%, at least about 55%, at least about 60%, at least about 65%, at least about 70%, at least about 75%, at least about 80%, at least about 85%, at least about 90%, at least about 91%, at least about 92%, at least about 93%, at least about 94%, at least about 95%, at least about 96%, at least about 97%, at least about 98%, or at least about 99%.

[0318] The expression of MLH1 can be assessed based on the level of any variable associated with MLH1 gene expression, e.g., MLH1 mRNA level or MLH1 protein level.

[0319] Inhibition or reduction can be assessed by a decrease in an absolute or relative level of one or more of these variables compared with a control level. The control level can be any type of control level that is utilized in the art, e.g., a pre-dose baseline level, or a level determined from a similar subject, cell, or sample that is untreated or treated with a control (such as, e.g., buffer only control or inactive agent control).

[0320] In some aspects, surrogate markers can be used to detect inhibition or reduction of MLH1. For example, effective treatment of a trinucleotide repeat expansion disorder, as demonstrated by acceptable diagnostic and monitoring criteria with an agent to reduce MLH1 expression can be understood to demonstrate a clinically relevant reduction in MLH1.

[0321] In some aspects of the methods, expression of MLH1 is inhibited or reduced by at least 20%, 25%, 30%, 35%, 40%, 45%, 50%, 55%, 60%, 65%, 70%, 75%, 80%, 85%, 90%, or 95%, or to below the level of detection of the assay. In some aspects, the methods include a clinically relevant inhibition or reduction of expression of MLH1, e.g. as demonstrated by a clinically relevant outcome after treatment of a subject with an agent to reduce the expression of MLH1.

[0322] Inhibition or reduction of the expression of MLH1 can be manifested by a reduction of the amount of mRNA expressed by a first cell or group of cells (such cells can be present, for example, in a sample derived from a subject) in which MLH1 is transcribed and which has or have been treated (e.g., by contacting the cell or cells with an antisense oligonucleotide or dsRNA, or by administering an antisense oligonucleotide or dsRNA to a subject in which the cells are or were present) such that the expression of MLH1 is inhibited or reduced, as compared to a second cell or group of cells substantially identical to the first cell or group of cells but which has not or have not been so treated (control cell(s) not treated with an antisense oligonucleotide or dsRNA or not treated with an antisense oligonucleotide or dsRNA targeted to the gene of interest). The degree of inhibition or reduction can be expressed in terms of:

$$\frac{( mRNA in control cells ) - ( mRNA in treated cells )}{( mRNA in control cells )} \times 100 \%$$

[0323] In other aspects, inhibition or reduction of the expression of MLH1 can be assessed in terms of a reduction of a parameter that is functionally linked to MLH1 gene expression, e.g., MLH1 protein expression or MLH1 signaling pathways. MLH1 silencing can be determined in any cell expressing MLH1, either endogenous or heterologous from an expression construct, and by any assay known in the art.

[0324] Inhibition or reduction of the expression of a MLH1 protein can be manifested by a reduction in the level of the MLH1 protein that is expressed by a cell or group of cells (e.g., the level of protein expressed in a sample derived from a subject). As explained above, for the assessment of mRNA suppression, the inhibition or reduction of protein expression levels in a treated cell or group of cells can similarly be expressed as a percentage of the level of protein in a control cell or group of cells.

[0325] A control cell or group of cells that can be used to assess the inhibition or reduction of the expression of MLH1 includes a cell or group of cells that has not yet been contacted with an antisense oligonucleotide or dsRNA. For example, the control cell or group of cells can be derived from an individual subject (e.g., a human or animal subject) prior to treatment of the subject with an antisense oligonucleotide or dsRNA.

[0326] The level of MLH1 mRNA that is expressed by a cell or group of cells can be determined using any method known in the art for assessing mRNA expression. In one aspect, the level of expression of MLH1 in a sample is determined by detecting a transcribed polynucleotide, or portion thereof, e.g., mRNA of the MLH1 gene. RNA can be extracted from cells using RNA extraction techniques including, for example, using acid phenol/guanidine isothiocyanate extraction (RNAzol B; Biogenesis), RNEASY™ RNA preparation kits (Qiagen) or PAXgene (PreAnalytix, Switzerland). Typical assay formats utilizing ribonucleic acid hybridization include nuclear run-on assays, RT-PCR, RNase protection assays, northern blotting, in situ hybridization, and microarray analysis. Circulating MLH1 mRNA can be detected using methods the described in PCT Publication WO2012/177906, the entire contents of which are hereby incorporated herein by reference. In some aspects, the level of expression of MLH1 is determined using a nucleic acid probe. The term “probe,” as used herein, refers to any molecule that is capable of selectively binding to a specific MLH1 sequence, e.g. to an mRNA or polypeptide. Probes can be synthesized by one of skill in the art, or derived from appropriate biological preparations. Probes can be specifically designed to be labeled. Examples of molecules that can be utilized as probes include, but are not limited to, RNA, DNA, proteins, antibodies, and organic molecules.

[0327] Isolated mRNA can be used in hybridization or amplification assays that include, but are not limited to, Southern or northern analyses, polymerase chain reaction (PCR) analyses, and probe arrays. One method for the determination of mRNA levels involves contacting the isolated mRNA with a nucleic acid molecule (probe) that can hybridize to MLH1 mRNA. In one aspect, the mRNA is immobilized on a solid surface and contacted with a probe, for example by running the isolated mRNA on an agarose gel and transferring the mRNA from the gel to a membrane, such as nitrocellulose. In an alternative aspect, the probe(s) are immobilized on a solid surface and the mRNA is contacted with the probe(s), for example, in an AFFYMETRIX gene chip array. A skilled artisan can readily adapt known mRNA detection methods for use in determining the level of MLH1 mRNA.

[0328] An alternative method for determining the level of expression of MLH1 in a sample involves the process of nucleic acid amplification and/or reverse transcriptase (to prepare cDNA) of for example mRNA in the sample, e.g., by RT-PCR (the experimental aspect set forth in Mullis, 1987, U.S. Pat. No. 4,683,202), ligase chain reaction (Barany (1991) Proc. Natl. Acad. Sci. USA 88:189-193), self-sustained sequence replication (Guatelli et al. (1990) Proc. Natl. Acad. Sci. USA 87:1874-1878), transcriptional amplification system (Kwoh et al. (1989) Proc. Natl. Acad. Sci. USA 86:1173-1177), Q-Beta Replicase (Lizardi et al. (1988) Bio/Technology 6:1197), rolling circle replication (Lizardi et al., U.S. Pat. No. 5,854,033) or any other nucleic acid amplification method, followed by the detection of the amplified molecules using techniques well known to those of skill in the art. These detection schemes are especially useful for the detection of nucleic acid molecules if such molecules are present in very low numbers. In some aspects, the level of expression of MLH1 is determined by quantitative fluorogenic RT-PCR (i.e., the TAQMAN™ System) or the DUAL-GLO® Luciferase assay.

[0329] The expression levels of MLH1 mRNA can be monitored using a membrane blot (such as used in hybridization analysis such as northern, Southern, dot, and the like), or microwells, sample tubes, gels, beads or fibers (or any solid support comprising bound nucleic acids). See U.S. Pat. Nos. 5,770,722; 5,874,219; 5,744,305; 5,677,195; and 5,445,934, which are incorporated herein by reference. The determination of MLH1 expression level can comprise using nucleic acid probes in solution.

[0330] In some aspects, the level of mRNA expression is assessed using branched DNA (bDNA) assays or real time PCR (qPCR). The use of this PCR method is described and exemplified in the Examples presented herein. Such methods can be used for the detection of MLH1 nucleic acids.

[0331] The level of MLH1 protein expression can be determined using any method known in the art for the measurement of protein levels. Such methods include, for example, electrophoresis, capillary electrophoresis, high performance liquid chromatography (HPLC), thin layer chromatography (TLC), hyperdiffusion chromatography, fluid or gel precipitin reactions, absorption spectroscopy, a colorimetric assays, spectrophotometric assays, flow cytometry, immunodiffusion (single or double), immunoelectrophoresis, western blotting, radioimmunoassay (RIA), enzyme-linked immunosorbent assays (ELISAs), immunofluorescent assays, electrochemiluminescence assays, and the like. Such assays can be used for the detection of proteins indicative of the presence or replication of MLH1 proteins.

[0332] In some aspects of the methods described herein, the antisense oligonucleotide or dsRNA is administered to a subject such that the antisense oligonucleotide or dsRNA is delivered to a specific site within the subject. The inhibition or reduction of expression of MLH1 can be assessed using measurements of the level or change in the level of MLH1 mRNA or MLH1 protein in a sample derived from a specific site within the subject. In certain aspects, the methods include a clinically relevant inhibition of expression of MLH1, e.g., as demonstrated by a clinically relevant outcome after treatment of a subject with an agent to reduce the expression of MLH1.

[0333] In other aspects, the antisense oligonucleotide or dsRNA is administered in an amount and for a time effective to result in one of (or more, e.g., two or more, three or more, four or more op: (a) decrease the number of trinucleotide repeats, (b) decrease the level of polyglutamine, (c) decreased cell death (e.g., CNS cell death and/or muscle cell death), (d) delayed onset of the disorder, (e) increased survival of subject, and (f) increased progression free survival of a subject.

[0334] Treating trinucleotide repeat expansion disorders can result in an increase in average survival time of an individual or a population of subjects treated with an antisense oligonucleotide or dsRNA described herein in comparison to a population of untreated subjects. For example, the survival time of an individual or average survival time of a population is increased by more than 30 days (more than 60 days, 90 days, or 120 days). An increase in survival time of an individual or in average survival time of a population can be measured by any reproducible means. An increase in survival time of an individual can be measured, for example, by calculating for an individual the length of survival time following the initiation of treatment with the compound described herein. An increase in average survival time of a population can be measured, for example, by calculating for the average length of survival time following initiation of treatment with the compound described herein. An increase in survival time of an individual can be measured, for example, by calculating for an individual length of survival time following completion of a first round of treatment with a compound or pharmaceutically acceptable salt of a compound described herein. An increase in average survival time of a population can be measured, for example, by calculating for a population the average length of survival time following completion of a first round of treatment with a compound or pharmaceutically acceptable salt of a compound described herein.

[0335] Treating trinucleotide repeat expansion disorders can result in a decrease in the mortality rate of a population of treated subjects in comparison to an untreated population. For example, the mortality rate is decreased by more than 2% (e.g., more than 5%, 10%, or 25%). A decrease in the mortality rate of a population of treated subjects can be measured by any reproducible means, for example, by calculating for a population the average number of disease-related deaths per unit time following initiation of treatment with a compound or pharmaceutically acceptable salt of a compound described herein. A decrease in the mortality rate of a population can be measured, for example, by calculating for a population the average number of disease-related deaths per unit time following completion of a first round of treatment with a compound or pharmaceutically acceptable salt of a compound described herein.

[0336] A. Delivery of anti-MLH1 Agents

[0337] The delivery of an antisense oligonucleotide or dsRNA to a cell e.g., a cell within a subject, such as a human subject e.g., a subject in need thereof, such as a subject having a trinucleotide repeat expansion disorder can be achieved in a number of different ways. For example, delivery can be performed by contacting a cell with an antisense oligonucleotide or dsRNA either in vitro or in vivo.

[0338] In vivo delivery can also be performed directly by administering a composition comprising an antisense oligonucleotide or a dsRNA, e.g., a siRNA or a shRNA to a subject. These alternatives are discussed further below. In general, any method of delivering a nucleic acid molecule (in vitro or in vivo) can be adapted for use with an antisense oligonucleotide or dsRNA (see e.g., Akhtar S. and Julian R L., (1992) Trends Cell. Biol. 2(5):139-144 and WO94/02595, which are incorporated herein by reference in their entireties). For in vivo delivery, factors to consider to deliver an antisense oligonucleotide or dsRNA include, for example, biological stability of the delivered molecule, prevention of non-specific effects, and accumulation of the delivered molecule in the target tissue. The non-specific effects of an antisense oligonucleotide or dsRNA can be minimized by local administration, for example, by direct injection or implantation into a tissue or topically administering the preparation. Local administration to a treatment site maximizes local concentration of the agent, limits the exposure of the agent to systemic tissues that can otherwise be harmed by the agent or that can degrade the agent, and permits a lower total dose of the antisense oligonucleotide or dsRNA to be administered.

[0339] For administering an antisense oligonucleotide or dsRNA systemically for the treatment of a disease, the antisense oligonucleotide or dsRNA can include alternative nucleobases, alternative sugar moieties, and/or alternative internucleoside linkages, or alternatively delivered using a drug delivery system; both methods act to prevent the rapid degradation of the antisense oligonucleotide or dsRNA by endo- and exo-nucleases in vivo. Modification of the antisense oligonucleotide or dsRNA or the pharmaceutical carrier can permit targeting of the antisense oligonucleotide or dsRNA composition to the target tissue and avoid undesirable off-target effects. Antisense oligonucleotides or ds RNAs can be modified by chemical conjugation to lipophilic groups such as cholesterol to enhance cellular uptake and prevent degradation. For example, a dsRNA directed against ApoB conjugated to a lipophilic cholesterol moiety was injected systemically into mice and resulted in knockdown of apoB mRNA in both the liver and jejunum (Soutschek, J. et al., (2004) Nature 432:173-178). Conjugation of a dsRNA to an aptamer has been shown to reduce tumor growth and mediate tumor regression in a mouse model of prostate cancer (McNamara, J O. et al., (2006) Nat. Biotechnol. 24:1005-1015). In an alternative aspect, the antisense oligonucleotide or dsRNA can be delivered using drug delivery systems such as a nanoparticle, a lipid nanoparticle, a polyplex nanoparticle, a lipoplex nanoparticle, a dendrimer, a polymer, liposomes, or a cationic delivery system. Positively charged cationic delivery systems facilitate binding of an antisense oligonucleotide or dsRNA (negatively charged) and also enhance interactions at the negatively charged cell membrane to permit efficient uptake of an antisense oligonucleotide or dsRNA by the cell. Cationic lipids, dendrimers, or polymers can either be bound to an oligonucleotide, or induced to form a vesicle or micelle (see e.g., Kim S H. et al., (2008) Journal of Controlled Release 129(2):107-116) that encases an antisense oligonucleotide or dsRNA. The formation of vesicles or micelles further prevents degradation of the antisense oligonucleotide or dsRNA when administered systemically. In general, any methods of delivery of nucleic acids known in the art can be adaptable to the delivery of the antisense oligonucleotides or dsRNAs. Methods for making and administering cationic antisense oligonucleotide or dsRNA complexes are well within the abilities of one skilled in the art (see e.g., Sorensen, D R., et al. (2003) J. Mol. Biol 327:761-766; Verma, U N. et al., (2003) Clin. Cancer Res. 9:1291-1300; Arnold, A S et al., (2007) J. Hypertens. 25:197-205, which are incorporated herein by reference in their entirety). Some non-limiting examples of drug delivery systems useful for systemic delivery of antisense oligonucleotides or dsRNAs include DOTAP (Sorensen, D R., et al (2003), supra; Verma, U N. et al., (2003), supra), Oligofectamine, “solid nucleic acid lipid particles” (Zimmermann, T S. et al., (2006) Nature 441:111-114), cardiolipin (Chien, P Y. et al., (2005) Cancer Gene Ther. 12:321-328; Pal, A. et al., (2005) Int J. Oncol. 26:1087-1091), polyethyleneimine (Bonnet M E. et al., (2008) Pharm. Res. August 16 Epub ahead of print; Aigner, A. (2006) J. Biomed. Biotechnol. 71659), Arg-Gly-Asp (RGD) peptides (Liu, S. (2006) Mol. Pharm. 3:472-487), and polyamidoamines (Tomalia, D A. et al., (2007) Biochem. Soc. Trans. 35:61-67; Yoo, H. et al., (1999) Pharm. Res. 16:1799-1804). In some aspects, an antisense oligonucleotide or dsRNA forms a complex with cyclodextrin for systemic administration. Methods for administration and pharmaceutical compositions of antisense oligonucleotides or dsRNAs and cyclodextrins can be found in U.S. Pat. No. 7,427,605, which is herein incorporated by reference in its entirety. In some aspects, the antisense oligonucleotides or dsRNAs are delivered by polyplex or lipoplex nanoparticles. Methods for administration and pharmaceutical compositions of antisense oligonucleotides or dsRNAs and polyplex nanoparticles and lipoplex nanoparticles can be found in U.S. Patent Application Nos. 2017/0121454; 2016/0369269; 2016/0279256; 2016/0251478; 2016/0230189; 2015/0335764; 2015/0307554; 2015/0174549; 2014/0342003; 2014/0135376; and 2013/0317086, which are herein incorporated by reference in their entirety.

[0340] i. Vector Delivery Methods

[0341] dsRNA targeting MLH1 can be expressed from transcription units inserted into DNA or RNA vectors (see, e.g., Couture, A, et al., TIG. (1996), 12:5-10; Skillern, A., et al., International PCT Publication No. WO 00/22113, Conrad, International PCT Publication No. WO 00/22114, and Conrad, U.S. Pat. No. 6,054,299). Expression can be transient (on the order of hours to weeks) or sustained (weeks to months or longer), depending upon the specific construct used and the target tissue or cell type. These transgenes can be introduced as a linear construct, a circular plasmid, or a viral vector, which can be an integrating or non-integrating vector. The transgene can be constructed to permit it to be inherited as an extrachromosomal plasmid (Gassmann, et al., (1995) Proc. Natl. Acad. Sci. USA 92:1292).

[0342] The individual strand or strands of a dsRNA can be transcribed from a promoter on an expression vector. Where two separate strands are to be expressed to generate, for example, a dsRNA, two separate expression vectors can be co-introduced (e.g., by transfection or infection) into a target cell. Alternatively, each individual strand of a dsRNA can be transcribed by promoters both of which are located on the same expression plasmid. In one embodiment, a dsRNA is expressed as inverted repeat polynucleotides joined by a linker polynucleotide sequence such that the dsRNA has a stem and loop structure.

[0343] dsRNA expression vectors are generally DNA plasmids or viral vectors. Expression vectors compatible with eukaryotic cells, such as those compatible with vertebrate cells, can be used to produce recombinant constructs for the expression of a dsRNA as described herein. Eukaryotic cell expression vectors are well known in the art and are available from a number of commercial sources. Typically, such vectors are provided containing convenient restriction sites for insertion of the desired nucleic acid segment. Delivery of dsRNA expressing vectors can be systemic, such as by intravenous or intramuscular administration, by administration to target cells ex-planted from the patient followed by reintroduction into the patient, or by any other means that allows for introduction into a desired target cell.

[0344] In some embodiments, the dsRNA agent that reduces the level and/or activity of MLH1 is delivered by a viral vector (e.g., a viral vector expressing an anti-MLH1 agent). Viral genomes provide a rich source of vectors that can be used for the efficient delivery of exogenous genes into a mammalian cell. Viral genomes are particularly useful vectors for gene delivery because the polynucleotides contained within such genomes are typically incorporated into the nuclear genome of a mammalian cell by generalized or specialized transduction. These processes occur as part of the natural viral replication cycle, and do not require added proteins or reagents in order to induce gene integration. Examples of viral vectors include a retrovirus (e.g., Retroviridae family viral vector), adenovirus (e.g., Ad5, Ad26, Ad34, Ad35, and Ad48), parvovirus (e.g., adeno-associated viruses), coronavirus, negative strand RNA viruses such as orthomyxovirus (e.g., influenza virus), rhabdovirus (e.g., rabies and vesicular stomatitis virus), paramyxovirus (e.g., measles and Sendai), positive strand RNA viruses, such as picornavirus and alphavirus, and double-stranded DNA viruses including adenovirus, herpesvirus (e.g., Herpes Simplex virus types 1 and 2, Epstein-Barr virus, cytomegalovirus, replication deficient herpes virus), and poxvirus (e.g., vaccinia, modified vaccinia Ankara (MVA), fowlpox and canarypox). Other viruses include Norwalk virus, togavirus, flavivirus, reoviruses, papovavirus, hepadnavirus, human papilloma virus, human foamy virus, and hepatitis virus, for example. Examples of retroviruses include: avian leukosis-sarcoma, avian C-type viruses, mammalian C-type, B-type viruses, D-type viruses, oncoretroviruses, HTLV-BLV group, lentivirus, alpharetrovirus, gammaretrovirus, spumavirus (Coffin, J. M., Retroviridae: The viruses and their replication, Virology (Third Edition) Lippincott-Raven, Philadelphia, 1996). Other examples include murine leukemia viruses, murine sarcoma viruses, mouse mammary tumor virus, bovine leukemia virus, feline leukemia virus, feline sarcoma virus, avian leukemia virus, human T cell leukemia virus, baboon endogenous virus, Gibbon ape leukemia virus, Mason Pfizer monkey virus, simian immunodeficiency virus, simian sarcoma virus, Rous sarcoma virus and lentiviruses. Other examples of vectors are described, for example, in U.S. Pat. No. 5,801,030, the vectors of which are incorporated herein by reference.

[0345] Exemplary viral vectors include lentiviral vectors, AAVs, and retroviral vectors. Lentiviral vectors and AAVs can integrate into the genome without cell divisions, and both types have been tested in pre-clinical animal studies. Methods for preparation of AAVs are described in the art e.g., in U.S. Pat. Nos. 5,677,158, 6,309,634, and 6,683,058, the methods of which is incorporated herein by reference. Methods for preparation and in vivo administration of lentiviruses are described in US 20020037281, the methods of which are incorporated herein by reference. In one aspect, a lentiviral vector is a replication-defective lentivirus particle. Such a lentivirus particle can be produced from a lentiviral vector comprising a 5′ lentiviral LTR, a tRNA binding site, a packaging signal, a promoter operably linked to a polynucleotide signal encoding the fusion protein, an origin of second strand DNA synthesis and a 3′ lentiviral LTR.

[0346] Retroviruses are most commonly used in human clinical trials, as they carry 7-8 kb, and have the ability to infect cells and have their genetic material stably integrated into the host cell with high efficiency (see, e.g., WO 95/30761; WO 95/24929, the retroviruses of which is incorporated herein by reference). In one aspect, a retroviral vector is replication defective. This prevents further generation of infectious retroviral particles in the target tissue. Thus, the replication defective virus becomes a “captive” transgene stable incorporated into the target cell genome. This is typically accomplished by deleting the gag, env, and pol genes (along with most of the rest of the viral genome). Heterologous nucleic acids are inserted in place of the deleted viral genes. The heterologous genes can be under the control of the endogenous heterologous promoter, another heterologous promoter active in the target cell, or the retroviral 5′ LTR (the viral LTR is active in diverse tissues).

[0347] These delivery vectors described herein can be made target-specific by attaching, for example, a sugar, a glycolipid, or a protein (e.g., an antibody to a target cell receptor).

[0348] Reversible delivery expression systems can be used. The Cre-loxP or FLP/FRT system and other similar systems can be used for reversible delivery-expression of one or more of the above-described nucleic acids. See WO2005/112620, WO2005/039643, US20050130919, US20030022375, US20020022018, US20030027335, and US20040216178, the systems of which are herein incorporated by reference. In particular, the reversible delivery-expression system described in US20100284990, the systems of which are herein incorporated by reference, can be used to provide a selective or emergency shut-off.

[0349] ii. Membranous Molecular Assembly Delivery Methods

[0350] The antisense oligonucleotides and dsRNAs can be delivered using a variety of membranous molecular assembly delivery methods including polymeric, biodegradable microparticle, or microcapsule delivery devices known in the art. For example, a colloidal dispersion system can be used for targeted delivery of an antisense oligonucleotide or dsRNA agent described herein. Colloidal dispersion systems include macromolecule complexes, nanocapsules, microspheres, beads, and lipid-based systems including oil-in-water emulsions, micelles, mixed micelles, and liposomes. Liposomes are artificial membrane vesicles that are useful as delivery vehicles in vitro and in vivo. It has been shown that large unilamellar vesicles (LUV), which range in size from 0.2-4.0 μm can encapsulate a substantial percentage of an aqueous buffer containing large macromolecules. Liposomes are useful for the transfer and delivery of active ingredients to the site of action. Because the liposomal membrane is structurally similar to biological membranes, when liposomes are applied to a tissue, the liposomal bilayer fuses with bilayer of the cellular membranes. As the merging of the liposome and cell progresses, the internal aqueous contents that include the antisense oligonucleotide or dsRNA are delivered into the cell where the antisense oligonucleotide or dsRNA can specifically bind to a target RNA and can mediate RNase H-mediated gene silencing. In some cases, the liposomes are also specifically targeted, e.g., to direct the oligonucleotide to particular cell types. The composition of the liposome is usually a combination of phospholipids, usually in combination with steroids, especially cholesterol. Other phospholipids or other lipids can be used. The physical characteristics of liposomes depend on pH, ionic strength, and the presence of divalent cations.

[0351] A liposome containing an antisense oligonucleotide or dsRNA can be prepared by a variety of methods. In one example, the lipid component of a liposome is dissolved in a detergent so that micelles are formed with the lipid component. For example, the lipid component can be an amphipathic cationic lipid or lipid conjugate. The detergent can have a high critical micelle concentration and can be nonionic. Exemplary detergents include cholate, CHAPS, octylglucoside, deoxycholate, and lauroyl sarcosine. The antisense oligonucleotide or dsRNA preparation is then added to the micelles that include the lipid component. The cationic groups on the lipid interact with the antisense oligonucleotide or dsRNA and condense around the antisense oligonucleotide or dsRNA to form a liposome. After condensation, the detergent is removed, e.g., by dialysis, to yield a liposomal preparation of antisense oligonucleotide or dsRNA.

[0352] If necessary, a carrier compound that assists in condensation can be added during the condensation reaction, e.g., by controlled addition. For example, the carrier compound can be a polymer other than a nucleic acid (e.g., spermine or spermidine). The pH can be adjusted to favor condensation.

[0353] Methods for producing stable polynucleotide delivery vehicles, which incorporate a polynucleotide/cationic lipid complex as a structural component of the delivery vehicle, are further described in, e.g., WO 96/37194, the entire contents of which are incorporated herein by reference. Liposome formation can include one or more aspects of exemplary methods described in Feigner, P. L. et al., (1987) Proc. Natl. Acad. Sci. USA 8:7413-7417; U.S. Pat. Nos. 4,897,355; 5,171,678; Bangham et al., (1965) M. Mol. Biol. 23:238; Olson et al., (1979) Biochim. Biophys. Acta 557:9; Szoka et al., (1978) Proc. Natl. Acad. Sci. 75: 4194; Mayhew et al., (1984) Biochim. Biophys. Acta 775:169; Kim et al., (1983) Biochim. Biophys. Acta 728:339; and Fukunaga et al., (1984) Endocrinol. 115:757. Commonly used techniques for preparing lipid aggregates of appropriate size for use as delivery vehicles include sonication and freeze-thaw plus extrusion (see, e.g., Mayer et al., (1986) Biochim. Biophys. Acta 858:161. Microfluidization can be used when consistently small (50 to 200 nm) and relatively uniform aggregates are desired (Mayhew et al., (1984) Biochim. Biophys. Acta 775:169). These methods are readily adapted to packaging antisense oligonucleotide or dsRNA preparations into liposomes.

[0354] Liposomes fall into two broad classes. Cationic liposomes are positively charged liposomes which interact with the negatively charged nucleic acid molecules to form a stable complex. The positively charged nucleic acid/liposome complex binds to the negatively charged cell surface and is internalized in an endosome. Due to the acidic pH within the endosome, the liposomes are ruptured, releasing their contents into the cell cytoplasm (Wang et al. (1987) Biochem. Biophys. Res. Commun., 147:980-985).

[0355] Liposomes, which are pH-sensitive or negatively charged, entrap nucleic acids rather than complex with them. Since both the nucleic acid and the lipid are similarly charged, repulsion rather than complex formation occurs. Nevertheless, some nucleic acid is entrapped within the aqueous interior of these liposomes. pH sensitive liposomes have been used to deliver nucleic acids encoding the thymidine kinase gene to cell monolayers in culture. Expression of the exogenous gene was detected in the target cells (Zhou et al. (1992) Journal of Controlled Release, 19:269-274).

[0356] One major type of liposomal composition includes phospholipids other than naturally-derived phosphatidylcholine. Neutral liposome compositions, for example, can be formed from dimyristoyl phosphatidylcholine (DMPC) or dipalmitoyl phosphatidylcholine (DPPC). Anionic liposome compositions generally are formed from dimyristoyl phosphatidylglycerol, while anionic fusogenic liposomes are formed primarily from dioleoyl phosphatidylethanolamine (DOPE). Another type of liposomal composition is formed from phosphatidylcholine (PC) such as, for example, soybean PC, and egg PC. Another type is formed from mixtures of phospholipid and/or phosphatidylcholine and/or cholesterol.

[0357] Examples of other methods to introduce liposomes into cells in vitro and in vivo include U.S. Pat. Nos. 5,283,185; 5,171,678; WO 94/00569; WO 93/24640; WO 91/16024; Feigner, (1994) J. Biol. Chem. 269:2550; Nabel, (1993) Proc. Natl. Acad. Sci. 90:11307; Nabel, (1992) Human Gene Ther. 3:649; Gershon, (1993) Biochem. 32:7143; and Strauss, (1992) EMBO J. 11:417.

[0358] Non-ionic liposomal systems have also been examined to determine their utility in the delivery of drugs to the skin, in particular systems comprising non-ionic surfactant and cholesterol. Non-ionic liposomal formulations comprising NOVASOME™ I (glyceryl dilaurate/cholesterol/polyoxyethylene-10-stearyl ether) and NOVASOME™ II (glyceryl distearate/cholesterol/polyoxyethylene-10-stearyl ether) were used to deliver cyclosporin-A into the dermis of mouse skin. Results indicated that such non-ionic liposomal systems were effective in facilitating the deposition of cyclosporine A into different layers of the skin (Hu et al., (1994) S.T.P. Pharma. Sci., 4(6):466).

[0359] Liposomes can be sterically stabilized liposomes, comprising one or more specialized lipids that result in enhanced circulation lifetimes relative to liposomes lacking such specialized lipids. Examples of sterically stabilized liposomes are those in which part of the vesicle-forming lipid portion of the liposome (A) comprises one or more glycolipids, such as monosialoganglioside G_{M1}, or (B) is derivatized with one or more hydrophilic polymers, such as a polyethylene glycol (PEG) moiety. While not wishing to be bound by any particular theory, it is thought in the art that, at least for sterically stabilized liposomes containing gangliosides, sphingomyelin, or PEG-derivatized lipids, the enhanced circulation half-life of these sterically stabilized liposomes derives from a reduced uptake into cells of the reticuloendothelial system (RES) (Allen et al., (1987) FEBS Letters, 223:42; Wu et al., (1993) Cancer Research, 53:3765).

[0360] Various liposomes comprising one or more glycolipids are known in the art. Papahadjopoulos et al. (Ann. N.Y. Acad. Sci., (1987), 507:64) reported the ability of monosialoganglio G^{M1}, galactocerebroside sulfate, and phosphatidylinositol to improve blood half-lives of liposomes. These findings were expounded upon by Gabizon et al. (Proc. Natl. Acad. Sci. U.S.A., (1988), 85:6949). U.S. Pat. No. 4,837,028 and WO 88/04924, both to Allen et al., disclose liposomes comprising (1) sphingomyelin and (2) the ganglioside GM1 or a galactocerebroside sulfate ester. U.S. Pat. No. 5,543,152 (Webb et al.) discloses liposomes comprising sphingomyelin. Liposomes comprising 1,2-sn-dimyristoylphosphatidylcholine are disclosed in WO 97/13499 (Lim et al).

[0361] In one aspect, cationic liposomes are used. Cationic liposomes possess the advantage of being able to fuse to the cell membrane. Non-cationic liposomes, although not able to fuse as efficiently with the plasma membrane, are taken up by macrophages in vivo and can be used to deliver antisense oligonucleotides or dsRNAs to macrophages.

[0362] Further advantages of liposomes include: liposomes obtained from natural phospholipids are biocompatible and biodegradable; liposomes can incorporate a wide range of water and lipid soluble drugs; liposomes can protect encapsulated antisense oligonucleotides or dsRNAs in their internal compartments from metabolism and degradation (Rosoff, in “Pharmaceutical Dosage Forms,” Lieberman, Rieger and Banker (Eds.), 1988, volume 1, p. 245). Important considerations in the preparation of liposome formulations are the lipid surface charge, vesicle size and the aqueous volume of the liposomes.

[0363] A positively charged synthetic cationic lipid, N-[1-(2,3-dioleyloxy)propyl]-N,N,N-trimethylammonium chloride (DOTMA) can be used to form small liposomes that interact spontaneously with nucleic acid to form lipid-nucleic acid complexes which are capable of fusing with the negatively charged lipids of the cell membranes of tissue culture cells, resulting in delivery of antisense oligonucleotide or dsRNA (see, e.g., Feigner, P. L. et al., (1987) Proc. Natl. Acad. Sci. USA 8:7413-7417, and U.S. Pat. No. 4,897,355 for a description of DOTMA and its use with DNA).

[0364] A DOTMA analogue, 1,2-bis(oleoyloxy)-3-(trimethylammonia)propane (DOTAP) can be used in combination with a phospholipid to form DNA-complexing vesicles. LIPOFECTIN™ Bethesda Research Laboratories, Gaithersburg, Md.) is an effective agent for the delivery of highly anionic nucleic acids into living tissue culture cells that comprise positively charged DOTMA liposomes which interact spontaneously with negatively charged polynucleotides to form complexes. When enough positively charged liposomes are used, the net charge on the resulting complexes is also positive. Positively charged complexes prepared in this way spontaneously attach to negatively charged cell surfaces, fuse with the plasma membrane, and efficiently deliver functional nucleic acids into, for example, tissue culture cells. Another commercially available cationic lipid, 1,2-bis(oleoyloxy)-3,3-(trimethylammonia)propane (“DOTAP”) (Boehringer Mannheim, Indianapolis, Ind.) differs from DOTMA in that the oleoyl moieties are linked by ester, rather than ether linkages.

[0365] Other reported cationic lipid compounds include those that have been conjugated to a variety of moieties including, for example, carboxyspermine which has been conjugated to one of two types of lipids and includes compounds such as 5-carboxyspermylglycine dioctaoleoylamide (“DOGS”) (TRANSFECTAM™, Promega, Madison, Wis.) and dipalmitoylphosphatidylethanolamine 5-carboxyspermyl-amide (“DPPES”) (see, e.g., U.S. Pat. No. 5,171,678).

[0366] Another cationic lipid conjugate includes derivatization of the lipid with cholesterol (“DC-Chol”) which has been formulated into liposomes in combination with DOPE (See, Gao, X. and Huang, L., (1991) Biochim. Biophys. Res. Commun. 179:280). Lipopolylysine, made by conjugating polylysine to DOPE, has been reported to be effective for transfection in the presence of serum (Zhou, X. et al., (1991) Biochim. Biophys. Acta 1065:8). For certain cell lines, these liposomes containing conjugated cationic lipids, are said to exhibit lower toxicity and provide more efficient transfection than the DOTMA-containing compositions. Other commercially available cationic lipid products include DMRIE and DMRIE-HP (Vical, La Jolla, Calif.) and Lipofectamine (DOSPA) (Life Technology, Inc., Gaithersburg, Md.). Other cationic lipids suitable for the delivery of antisense oligonucleotides or dsRNAs are described in WO 98/39359 and WO 96/37194.

[0367] Liposomal formulations are particularly suited for topical administration, liposomes present several advantages over other formulations. Such advantages include reduced side effects related to high systemic absorption of the administered drug, increased accumulation of the administered drug at the desired target, and the ability to administer an antisense oligonucleotide or a dsRNA into the skin. In some implementations, liposomes are used for delivering an antisense oligonucleotide or dsRNA to epidermal cells and also to enhance the penetration of the antisense oligonucleotide or dsRNA into dermal tissues, e.g., into skin. For example, the liposomes can be applied topically. Topical delivery of drugs formulated as liposomes to the skin has been documented (see, e.g., Weiner et al., (1992) Journal of Drug Targeting, vol. 2,405-410 and du Plessis et al., (1992) Antiviral Research, 18:259-265; Mannino, R. J. and Fould-Fogerite, S., (1998) Biotechniques 6:682-690; Itani, T. et al., (1987) Gene 56:267-276; Nicolau, C. et al. (1987) Meth. Enzymol. 149:157-176; Straubinger, R. M. and Papahadjopoulos, D. (1983) Meth. Enzymol. 101:512-527; Wang, C. Y. and Huang, L., (1987) Proc. Natl. Acad. Sci. USA 84:7851-7855).

[0368] Non-ionic liposomal systems have also been examined to determine their utility in the delivery of drugs to the skin, in particular systems comprising non-ionic surfactant and cholesterol. Non-ionic liposomal formulations comprising NOVASOME I (glyceryl dilaurate/cholesterol/polyoxyethylene-10-stearyl ether) and NOVASOME II (glyceryl distearate/cholesterol/polyoxyethylene-10-stearyl ether) were used to deliver a drug into the dermis of mouse skin. Such formulations with antisense oligonucleotides or dsRNAs are useful for treating a dermatological disorder.

[0369] The targeting of liposomes is also possible based on, for example, organ-specificity, cell-specificity, and organelle-specificity and is known in the art. In the case of a liposomal targeted delivery system, lipid groups can be incorporated into the lipid bilayer of the liposome to maintain the targeting ligand in stable association with the liposomal bilayer. Various linking groups can be used for joining the lipid chains to the targeting ligand. Additional methods are known in the art and are described, for example in U.S. Patent Application Publication No. 20060058255, the linking groups of which are herein incorporated by reference.

[0370] Liposomes that include antisense oligonucleotides or dsRNAs can be made highly deformable. Such deformability can enable the liposomes to penetrate through pore that are smaller than the average radius of the liposome. For example, transfersomes are yet another type of liposomes, and are highly deformable lipid aggregates which are attractive candidates for drug delivery vehicles. Transfersomes can be described as lipid droplets which are so highly deformable that they are easily able to penetrate through pores which are smaller than the droplet. Transfersomes can be made by adding surface edge activators, usually surfactants, to a standard liposomal composition. Transfersomes that include antisense oligonucleotides or dsRNAs can be delivered, for example, subcutaneously by infection to deliver antisense oligonucleotides or dsRNAs to keratinocytes in the skin. To cross intact mammalian skin, lipid vesicles must pass through a series of fine pores, each with a diameter less than 50 nm, under the influence of a suitable transdermal gradient. In addition, due to the lipid properties, these transfersomes can be self-optimizing (adaptive to the shape of pores, e.g., in the skin), self-repairing, and can frequently reach their targets without fragmenting, and often self-loading. Transfersomes have been used to deliver serum albumin to the skin. The transfersome-mediated delivery of serum albumin has been shown to be as effective as subcutaneous injection of a solution containing serum albumin.

[0371] Other formulations amenable are described in U.S. provisional application Ser. No. 61/018,616, filed Jan. 2, 2008; 61/018,611, filed Jan. 2, 2008; 61/039,748, filed Mar. 26, 2008; 61/047,087, filed Apr. 22, 2008 and 61/051,528, filed May 8, 2008. PCT application No. PCT/US2007/080331, filed Oct. 3, 2007 also describes suitable formulations.

[0372] Surfactants find wide application in formulations such as emulsions (including microemulsions) and liposomes. The most common way of classifying and ranking the properties of the many different types of surfactants, both natural and synthetic, is by the use of the hydrophile/lipophile balance (HLB). The nature of the hydrophilic group (also known as the “head”) provides the most useful means for categorizing the different surfactants used in formulations (Rieger, in Pharmaceutical Dosage Forms, Marcel Dekker, Inc., New York, N.Y., 1988, p. 285).

[0373] If the surfactant molecule is not ionized, it is classified as a nonionic surfactant. Nonionic surfactants find wide application in pharmaceutical and cosmetic products and are usable over a wide range of pH values. In general, their HLB values range from 2 to about 18 depending on their structure. Nonionic surfactants include nonionic esters such as ethylene glycol esters, propylene glycol esters, glyceryl esters, polyglyceryl esters, sorbitan esters, sucrose esters, and ethoxylated esters. Nonionic alkanolamides and ethers such as fatty alcohol ethoxylates, propoxylated alcohols, and ethoxylated/propoxylated block polymers are also included in this class. The polyoxyethylene surfactants are the most popular members of the nonionic surfactant class.

[0374] If the surfactant molecule carries a negative charge when it is dissolved or dispersed in water, the surfactant is classified as anionic. Anionic surfactants include carboxylates such as soaps, acyl lactylates, acyl amides of amino acids, esters of sulfuric acid such as alkyl sulfates and ethoxylated alkyl sulfates, sulfonates such as alkyl benzene sulfonates, acyl isethionates, acyl taurates and sulfosuccinates, and phosphates. The most important members of the anionic surfactant class are the alkyl sulfates and the soaps.

[0375] If the surfactant molecule carries a positive charge when it is dissolved or dispersed in water, the surfactant is classified as cationic. Cationic surfactants include quaternary ammonium salts and ethoxylated amines. The quaternary ammonium salts are the most used members of this class.

[0376] If the surfactant molecule has the ability to carry either a positive or negative charge, the surfactant is classified as amphoteric. Amphoteric surfactants include acrylic acid derivatives, substituted alkylamides, N-alkylbetaines, and phosphatides.

[0377] The use of surfactants in drug products, formulations and in emulsions has been reviewed (Rieger, in Pharmaceutical Dosage Forms, Marcel Dekker, Inc., New York, N.Y., 1988, p. 285).

[0378] The antisense oligonucleotides or dsRNAs for use in the methods described herein can be provided as micellar formulations. Micelles are a particular type of molecular assembly in which amphipathic molecules are arranged in a spherical structure such that all the hydrophobic portions of the molecules are directed inward, leaving the hydrophilic portions in contact with the surrounding aqueous phase. The converse arrangement exists if the environment is hydrophobic.

[0379] Lipid Nanoparticle-Based Delivery Methods

[0380] The antisense oligonucleotides or dsRNAs can be fully encapsulated in a lipid formulation, e.g., a lipid nanoparticle (LNP), or other nucleic acid-lipid particle. LNPs are extremely useful for systemic applications, as they exhibit extended circulation lifetimes following intravenous (i.v.) injection and accumulate at distal sites (e.g., sites physically separated from the administration site). LNPs include “pSPLP,” which include an encapsulated condensing agent-nucleic acid complex as set forth in PCT Publication No. WO 00/03683. The particles typically have a mean diameter of about 50 nm to about 150 nm, more typically about 60 nm to about 130 nm, more typically about 70 nm to about 110 nm, most typically about 70 nm to about 90 nm, and are substantially nontoxic. In addition, the nucleic acids when present in the nucleic acid-lipid particles are resistant in aqueous solution to degradation with a nuclease. Nucleic acid-lipid particles and their method of preparation are disclosed in, e.g., U.S. Pat. Nos. 5,976,567; 5,981,501; 6,534,484; 6,586,410; 6,815,432; U.S. Publication No. 2010/0324120 and PCT Publication No. WO 96/40964.

[0381] In one aspect, the lipid to drug ratio (mass/mass ratio) (e.g., lipid to antisense oligonucleotide or dsRNA ratio) will be in the range of from about 1:1 to about 50:1, from about 1:1 to about 25:1, from about 3:1 to about 15:1, from about 4:1 to about 10:1, from about 5:1 to about 9:1, or about 6:1 to about 9:1. Ranges intermediate to the above recited ranges are also contemplated.

[0382] Non-limiting examples of cationic lipids include N,N-dioleyl-N,N-dimethylammonium chloride (DODAC), N,N-distearyl-N,N-dimethylammonium bromide (DDAB), N-(I-(2,3-dioleoyloxy)propyl)-N,N,N-trimethylammonium chloride (DOTAP), N-(I-(2,3-dioleyloxy)propyl)-N,N,N-trimethylammonium chloride (DOTMA), N,N-dimethyl-2,3-dioleyloxy)propylamine (DODMA), 1,2-DiLinoleyloxy-N,N-dimethylaminopropane (DLinDMA), 1,2-Dilinolenyloxy-N,N-dimethylaminopropane (DLenDMA), 1,2-Dilinoleylcarbamoyloxy-3-dimethylaminopropane (DLin-C-DAP), 1,2-Dilinoleywry-3-(dimethylamino)acetoxypropane (DLin-DAC), 1,2-Dilinoleyoxy-3-morpholinopropane (DLin-MA), 1,2-Dilinoleoyl-3-dimethylaminopropane (DLinDAP), 1,2-Dilinoleylthio-3-dimethylaminopropane (DLin-S-DMA), 1-Linoleoyl-2-linoleyloxy-3-dimethylaminopropane (DLin-2-DMAP), 1,2-Dilinoleyloxy-3-trimethylaminopropane chloride salt (DLin-TMA.CI), 1,2-Dilinoleoyl-3-trimethylaminopropane chloride salt (DLin-TAP.CI), 1,2-Dilinoleyloxy-3-(N-methylpiperazino)propane (DLin-MPZ), or 3-(N,N-Dilinoleylamino)-1,2-propanediol (DLinAP), 3-(N,N-Dioleylamino)-1,2-propanedio (DOAP), 1,2-Dilinoleyloxo-3-(2-N,N-dimethylamino)ethoxypropane (DLin-EG-DMA), 1,2-Dilinolenyloxy-N,N-dimethylaminopropane (DLinDMA), 2,2-Dilinoleyl-4-dimethylaminomethyl-[1,3]-dioxolane (DLin-K-DMA) or analogs thereof, (3aR,5s,6aS)-N,N-dimethyl-2,2-di((9Z,12Z)-octadeca-9,12-dienyetetrahydro-3aH-cyclopenta[d][1,3]dioxol-5-amine (ALN100), (6Z,9Z,28Z,31Z)-heptatriaconta-6,9,28,31-tetraen-19-yl4-(dimethylamino)butanoate (MC3), 1,1′-(2-(4-(2-(((2-(bis(2-hydroxydodecyl)amino)ethyl)(2-hydroxydodecyl)amino)ethyl)piperazin-1-yeethylazanediyedidodecan-2-01 (Tech G1), or a mixture thereof. The cationic lipid can comprise, for example, from about 20 mol to about 50 mol % or about 40 mol % of the total lipid present in the particle.

[0383] The ionizable/non-cationic lipid can be an anionic lipid or a neutral lipid including, but not limited to, distearoylphosphatidylcholine (DSPC), dioleoylphosphatidylcholine (DOPC), dipalmitoylphosphatidylcholine (DPPC), dioleoylphosphatidylglycerol (DOPG), dipalmitoylphosphatidylglycerol (DPPG), dioleoyl-phosphatidylethanolamine (DOPE), palmitoyloleoylphosphatidylcholine (POPC), palmitoyloleoylphosphatidylethanolamine (POPE), dioleoyl-phosphatidylethanolamine 4-(N-maleimidomethyl)-cyclohexane-1-carboxylate (DOPE-mal), dipalmitoyl phosphatidyl ethanolamine (DPPE), dimyristoylphosphoethanolamine (DMPE), distearoyl-phosphatidyl-ethanolamine (DSPE), 16-O-monomethyl PE, 16-O-dimethyl PE, 18-1-trans PE, 1-stearoyl-2-oleoyl-phosphatidyethanolamine (SOPE), cholesterol, or a mixture thereof. The non-cationic lipid can be, for example, from about 5 mol % to about 90 mol %, about 10 mol %, or about 60 mol % if cholesterol is included, of the total lipid present in the particle.

[0384] The conjugated lipid that inhibits or reduces aggregation of particles can be, for example, a polyethyleneglycol (PEG)-lipid including, without limitation, a PEG-diacylglycerol (DAG), a PEG-dialkyloxypropyl (DAA), a PEG-phospholipid, a PEG-ceramide (Cer), or a mixture thereof. The PEG-DAA conjugate can be, for example, a PEG-dilauryloxypropyl (C12), a PEG-dimyristyloxypropyl (C14), a PEG-dipalmityloxypropyl (Cm), or a PEG-distearyloxypropyl (Cm). The conjugated lipid that prevents aggregation of particles can be, for example, from 0 mol % to about 20 mol % or about 2 mol % of the total lipid present in the particle.

[0385] In some aspects, the nucleic acid-lipid particle further includes cholesterol at, e.g., about 10 mol % to about 60 mol % or about 50 mol % of the total lipid present in the particle.

[0386] Additional exemplary lipid-dsRNA formulations are described in Table 1 of WO 2018/195165, herein incorporated by reference.

[0387] B. Combination Therapies

[0388] An antisense oligonucleotide or dsRNA can be used alone or in combination with at least one additional therapeutic agent, e.g., other agents that treat trinucleotide repeat expansion disorders or symptoms associated therewith, or in combination with other types of therapies to treat trinucleotide repeat expansion disorders. In combination treatments, the dosages of one or more of the therapeutic compounds can be reduced from standard dosages when administered alone. For example, doses can be determined empirically from drug combinations and permutations or can be deduced by isobolographic analysis (e.g., Black et al., Neurology 65:S3-S6 (2005)). In this case, dosages of the compounds when combined should provide a therapeutic effect.

[0389] In some aspects, the antisense oligonucleotide or dsRNA agents described herein can be used in combination with at least one an additional therapeutic agent to treat a trinucleotide repeat expansion disorder associated with gene having a trinucleotide repeat (e.g., any of the trinucleotide repeat expansion disorders and associated genes having a trinucleotide repeat listed in Table 1). In some aspects, at least one of the additional therapeutic agents can be an antisense oligonucleotide or a dsRNA (e.g., siRNA or shRNA) that hybridizes with the mRNA of gene associated with a trinucleotide repeat expansion disorder (e.g., any of the genes listed in Table 1). In some aspects, the trinucleotide repeat expansion disorder is Huntington's disease (HD). In some aspects, the gene associated with a trinucleotide repeat expansion disorder is Huntingtin (HTT). Several allelic variants of the Huntingtin gene have been implicated in the etiology of Huntington's disease. In some cases, these variants are identified on the basis of having unique HD-associated single nucleotide polymorphisms (SNPs). In some aspects, the antisense oligonucleotide or dsRNA that is an additional therapeutic agent hybridizes to an mRNA of the Huntingtin gene containing any of the HD-associated SNPs known in the art (e.g., any of the HD-associated SNPs described in Skotte et al., PLoS One 2014, 9(9): e107434, Carroll et al., Mol. Ther. 2011, 19(12): 2178-85, Warby et al., Am. J. Hum. Gen. 2009, 84(3): 351-66 (herein incorporated by reference)). In some aspects, the antisense oligonucleotide or dsRNA that is an additional therapeutic agent hybridizes to an mRNA of the Huntingtin gene lacking any of the HD-associated SNPs. In some of the aspects, the antisense oligonucleotide or dsRNA that is an additional therapeutic agent hybridizes to an mRNA of the Huntingtin gene having any of the SNPs selected from the group of rs362307 and rs365331. In some aspects, the antisense oligonucleotide or dsRNA that is an additional therapeutic agent can be a modified oligonucleotide or dsRNA (e.g., an antisense oligonucleotide or dsRNA including any of the modifications described herein). In some aspects, the modified oligonucleotide or dsRNA that is an additional therapeutic agent comprises one or more phosphorothioate internucleoside linkages. In some aspects, the modified oligonucleotide or dsRNA that is an additional therapeutic agent comprises one or more 2′-MOE moieties. In some aspects, the antisense oligonucleotide or dsRNA that is an additional therapeutic agent that hybridizes to the mRNA of the Huntingtin gene has a sequence selected from the SEQ ID NOs. 6-285 of U.S. Pat. No. 9,006,198; SEQ ID NOs. 6-8 of US Patent Application Publication No. 2017/0044539; SEQ ID NOs. 1-1565 of US Patent Application Publication 2018/0216108; and SEQ ID NO. 1-2432 of PCT Publication WO 2017/192679, the sequences of which are hereby incorporated by reference.

[0390] In some aspects, at least one of the additional therapeutic agents is a chemotherapeutic agent (e.g., a cytotoxic agent or other chemical compound useful in the treatment of a trinucleotide repeat expansion disorder).

[0391] In some aspects, at least one of the additional therapeutic agents can be a therapeutic agent which is a non-drug treatment. For example, at least one of the additional therapeutic agents is physical therapy.

[0392] In any of the combination aspects described herein, the two or more therapeutic agents can be administered simultaneously or sequentially, in either order. For example, a first therapeutic agent can be administered immediately, up to 1 hour, up to 2 hours, up to 3 hours, up to 4 hours, up to 5 hours, up to 6 hours, up to 7 hours, up to, 8 hours, up to 9 hours, up to 10 hours, up to 11 hours, up to 12 hours, up to 13 hours, 14 hours, up to hours 16, up to 17 hours, up 18 hours, up to 19 hours up to 20 hours, up to 21 hours, up to 22 hours, up to 23 hours up to 24 hours or up to 1-7, 1-14, 1-21 or 1-30 days before or one or more of the additional therapeutic agents.

### V. Pharmaceutical Compositions

[0393] The antisense oligonucleotides or dsRNAs described herein can be formulated into pharmaceutical compositions for administration to human subjects in a biologically compatible form suitable for administration in vivo.

[0394] The compounds described herein can be used in the form of the free base, in the form of salts, solvates, and as prodrugs. All forms are within the methods described herein. In accordance with the methods described herein, the antisense oligonucleotides or dsRNAs or salts, solvates, or prodrugs thereof can be administered to a patient in a variety of forms depending on the selected route of administration, as will be understood by those skilled in the art. The compounds described herein can be administered, for example, by oral, parenteral, intrathecal, intracerebroventricular, intraparenchymal, buccal, sublingual, nasal, rectal, patch, pump, or transdermal administration and the pharmaceutical compositions formulated accordingly. Parenteral administration includes intravenous, intraperitoneal, subcutaneous, intramuscular, transepithelial, nasal, intrapulmonary, intrathecal, intracerebroventricular, intraparenchymal, rectal, and topical modes of administration. Parenteral administration can be by continuous infusion over a selected period of time.

[0395] A compound described herein can be orally administered, for example, with an inert diluent or with an assimilable edible carrier, or it can be enclosed in hard or soft shell gelatin capsules, or it can be compressed into tablets, or it can be incorporated directly with the food of the diet. For oral therapeutic administration, a compound described herein can be incorporated with an excipient and used in the form of ingestible tablets, buccal tablets, troches, capsules, elixirs, suspensions, syrups, and wafers. A compound described herein can be administered parenterally. Solutions of a compound described herein can be prepared in water suitably mixed with a surfactant, such as hydroxypropylcellulose. Dispersions can be prepared in glycerol, liquid polyethylene glycols, DMSO, and mixtures thereof with or without alcohol, and in oils. Under ordinary conditions of storage and use, these preparations can contain a preservative to prevent the growth of microorganisms. Conventional procedures and ingredients for the selection and preparation of suitable formulations are described, for example, in Remington's Pharmaceutical Sciences (2012, 22nd ed.) and in The United States Pharmacopeia: The National Formulary (USP 41 NF 36), published in 2018. The pharmaceutical forms suitable for injectable use include sterile aqueous solutions or dispersions and sterile powders for the extemporaneous preparation of sterile injectable solutions or dispersions. In all cases the form must be sterile and must be fluid to the extent that can be easily administered via syringe. Compositions for nasal administration can conveniently be formulated as aerosols, drops, gels, and powders. Aerosol formulations typically include a solution or fine suspension of the active substance in a physiologically acceptable aqueous or non-aqueous solvent and are usually presented in single or multidose quantities in sterile form in a sealed container, which can take the form of a cartridge or refill for use with an atomizing device. Alternatively, the sealed container can be a unitary dispensing device, such as a single dose nasal inhaler or an aerosol dispenser fitted with a metering valve which is intended for disposal after use. Where the dosage form includes an aerosol dispenser, it will contain a propellant, which can be a compressed gas, such as compressed air or an organic propellant, such as fluorochlorohydrocarbon. The aerosol dosage forms can take the form of a pump-atomizer. Compositions suitable for buccal or sublingual administration include tablets, lozenges, and pastilles, where the active ingredient is formulated with a carrier, such as sugar, acacia, tragacanth, gelatin, and glycerine. Compositions for rectal administration are conveniently in the form of suppositories containing a conventional suppository base, such as cocoa butter

[0396] The compounds described herein can be administered to an animal, e.g., a human, alone or in combination with pharmaceutically acceptable carriers, as noted herein, the proportion of which is determined by the solubility and chemical nature of the compound, chosen route of administration, and standard pharmaceutical practice.

### VI. Dosages

[0397] The dosage of the compositions (e.g., a composition including an antisense oligonucleotide or dsRNA) described herein, can vary depending on many factors, such as the pharmacodynamic properties of the compound; the mode of administration; the age, health, and weight of the recipient; the nature and extent of the symptoms; the frequency of the treatment, and the type of concurrent treatment, if any; and the clearance rate of the compound in the animal to be treated. The compositions described herein can be administered initially in a suitable dosage that can be adjusted as required, depending on the clinical response. In some aspects, the dosage of a composition (e.g., a composition including an antisense oligonucleotide or dsRNA) is a prophylactically or a therapeutically effective amount.

### VII. Kits

[0398] Kits including (a) a pharmaceutical composition including an antisense oligonucleotide or dsRNA agent that reduces the level and/or activity of MLH1 in a cell or subject described herein, and (b) a package insert with instructions to perform any of the methods described herein are contemplated. In some aspects, the kit includes (a) a pharmaceutical composition including an antisense oligonucleotide or dsRNA agent that reduces the level and/or activity of MLH1 in a cell or subject described herein, (b) an additional therapeutic agent, and (c) a package insert with instructions to perform any of the methods described herein.

### EXAMPLES

### Example 1. Design and Selection of Antisense Oligonucleotides or dsRNA Agents

[0399] Identification and selection of target transcripts: Target transcript selection and off-target scoring (below) utilized NCBI RefSeq sequences, downloaded from NCBI 21 Nov. 2018. Experimentally validated “NM” transcript models were used except for cynomolgus monkey, which only has “XM” predicted models for the large majority of genes. The longest human, mouse, rat, and cynomolgus monkey MLH1 transcript that contained all mapped internal exons was selected (SEQ IDs 1, 3, 4, and 5 for human, mouse, rat, and cynomolgus monkey, respectively, SEQ ID NO:2 is the protein sequence).

TABLE 2
Exemplary Human, Cyno, Mouse, and Rat MLH1 Transcripts

| Human (SEQ | Cyno (SEQ | Mouse (SEQ | Rat (SEQ |
|---|---|---|---|
| ID NO: 1) | ID NO: 3) | ID NO: 4) | ID NO: 5) |
| NM_000249.3 | XM_005546623.2 | NM_026810.2 | NM_031053.1 |

### Antisense Oligonucleotide

[0400] Selection of 20mer antisense oligonucleotide sequences: All antisense 20mer sub-sequences per transcript were generated. Candidate antisense oligonucleotides (“ASOs”) were selected that met the following thermodynamic and physical characteristics determined by the inventors: predicted melting temperature of ASO:target duplex (“Tm”) of 30-65° C., predicted melting temperature of hairpins (“Tₕₐᵢᵣₚᵢₙ”)<35° C., predicted melting temperature of homopolymer formation (“Tₕₒₘₒ”)<25° C., GC content of 20-60%, no G homopolymers 4 or longer, and no A, T, or C homopolymers of 6 or longer. These selected antisense oligonucleotides were further evaluated for specificity (off-target scoring, below).

[0401] Off-target scoring: The specificity of the preferred ASOs was evaluated via alignment to all unspliced RefSeq transcripts (“NM” models for human, mouse, and rat; “NM” and “XM” models for cynomolgus monkey), using the FASTA algorithm with an E value cutoff of 1000. The number of mismatches between each ASO and each transcript (per species) was tallied. An “off-target score” for each ASO in each species was calculated as the lowest number of mismatches to any transcript other than those encoded by the MLH1 gene.

[0402] Selection of ASOs for screening: A set of 480 preferred ASOs was selected for screening according to both specificity and ASO:mRNA (target) hybridization energy maximization information as follows. All candidate ASOs were evaluated for delta G of hybridization with the predicted target mRNA secondary structure (ΔG^{overall}) according to Xu and Mathews (Methods Mol Biol. 1490:15-34 (2016)). Next, two subsets of ASOs were chosen: First, 70 ASOs that matched human, cyno, and mouse target transcripts, had off-target scores of at least 1 in three species, and negative ΔG^{overall}; second, 410 ASOs that matched human and cyno target transcripts, had off-target scores of at least 2 in both species, and ΔG^{overall} less than −9.5 degrees Celsius.

[0403] The sequences, positions in human transcript, conservation in other species and species-specific off-target scores of each ASO are given in Table 3. Wherever indicated as “NC”, the ASO does not match the MLH1 gene in that species, and therefore off-target scores were not generated.

[0404] ASOs were synthesized as 5-10-5 “flanking sequence-DNA core sequence-flanking sequence” antisense oligonucleotides, with ribonucleotides at positions 1-5 and 16-20 and deoxyribonucleotides at positions 6-15, and with the following generic structure:

[0405] 5′-NmsNmsNmsNmsNmsNsNsNsNsNsNsNsNsNsNsNmsNmsNmsNmsNm-3′ wherein:
[0406] Nm: 2′-MOE residues (including 5methyl-2′-MOE-C and 5methyl-2′-MOE-U)
[0407] N: DNA/RNA residues
[0408] s: phosphorothioate (the backbone is fully phosphorothioate-modified)
[0409] All “C” within the DNA core (positions 6-15) are 5′-Methyl-2′-MOE-dC
[0410] All “T” in positions 1-5 or 16-20 are 5′-methyl-2′-MOE-U.

[0411] For primary screens at 2 nM and 20 nM, desalted antisense oligonucleotides were used. For detailed characterization of a subset of antisense oligonucleotides, antisense oligonucleotides were further purified by HPLC.

TABLE 3
Exemplary Antisense Oligonucleotides

| SEQ | | | | | | |
|---|---|---|---|---|---|---|
| ID | | | Off-target Score | | | |
| NO | Position | Sequence | Human | Cyno | Mouse | Rat |
| 6 | 2 | TGTGGGTTGCTGGGTCTCTT | 2 | NC | NC | NC |
| 7 | 7 | AACTCTGTGGGTTGCTGGGT | 2 | 2 | NC | NC |
| 8 | 14 | ATTTCTCAACTCTGTGGGTT | 2 | NC | NC | NC |
| 9 | 15 | AATTTCTCAACTCTGTGGGT | 2 | 1 | NC | NC |
| 10 | 16 | AAATTTCTCAACTCTGTGGG | 2 | 2 | NC | NC |
| 11 | 17 | CAAATTTCTCAACTCTGTGG | 1 | 3 | NC | NC |
| 12 | 18 | TCAAATTTCTCAACTCTGTG | 2 | 2 | NC | NC |
| 13 | 19 | GTCAAATTTCTCAACTCTGT | 2 | 2 | NC | NC |
| 14 | 20 | AGTCAAATTTCTCAACTCTG | 1 | 2 | NC | NC |
| 15 | 21 | CAGTCAAATTTCTCAACTCT | 1 | 2 | NC | NC |
| 16 | 22 | CCAGTCAAATTTCTCAACTC | 1 | NC | NC | NC |
| 17 | 23 | GCCAGTCAAATTTCTCAACT | 1 | NC | NC | NC |
| 18 | 24 | TGCCAGTCAAATTTCTCAAC | 1 | 2 | NC | NC |
| 19 | 25 | ATGCCAGTCAAATTTCTCAA | 2 | 2 | NC | NC |
| 20 | 26 | AATGCCAGTCAAATTTCTCA | 2 | 2 | NC | NC |
| 21 | 27 | GAATGCCAGTCAAATTTCTC | 3 | 1 | NC | NC |
| 22 | 28 | TGAATGCCAGTCAAATTTCT | 2 | 2 | NC | NC |
| 23 | 29 | TTGAATGCCAGTCAAATTTC | 2 | 2 | NC | NC |
| 24 | 30 | CTTGAATGCCAGTCAAATTT | 2 | 2 | NC | NC |
| 25 | 31 | GCTTGAATGCCAGTCAAATT | 2 | 2 | NC | NC |
| 26 | 32 | AGCTTGAATGCCAGTCAAAT | 2 | 2 | NC | NC |
| 27 | 33 | CAGCTTGAATGCCAGTCAAA | 2 | 2 | NC | NC |
| 28 | 34 | ACAGCTTGAATGCCAGTCAA | 2 | NC | NC | NC |
| 29 | 35 | GACAGCTTGAATGCCAGTCA | 2 | NC | NC | NC |
| 30 | 36 | GGACAGCTTGAATGCCAGTC | 1 | NC | NC | NC |
| 31 | 37 | TGGACAGCTTGAATGCCAGT | 2 | NC | NC | NC |
| 32 | 38 | TTGGACAGCTTGAATGCCAG | 2 | NC | NC | NC |
| 33 | 39 | ATTGGACAGCTTGAATGCCA | 1 | NC | NC | NC |
| 34 | 40 | GATTGGACAGCTTGAATGCC | 2 | NC | NC | NC |
| 35 | 41 | TGATTGGACAGCTTGAATGC | 2 | NC | NC | NC |
| 36 | 42 | TTGATTGGACAGCTTGAATG | 2 | NC | NC | NC |
| 37 | 43 | ATTGATTGGACAGCTTGAAT | 1 | NC | NC | NC |
| 38 | 44 | TATTGATTGGACAGCTTGAA | 1 | NC | NC | NC |
| 39 | 45 | CTATTGATTGGACAGCTTGA | 2 | NC | NC | NC |
| 40 | 46 | GCTATTGATTGGACAGCTTG | 2 | NC | NC | NC |
| 41 | 47 | AGCTATTGATTGGACAGCTT | 2 | NC | NC | NC |
| 42 | 49 | GCAGCTATTGATTGGACAGC | 2 | NC | NC | NC |
| 43 | 50 | GGCAGCTATTGATTGGACAG | 2 | NC | NC | NC |
| 44 | 51 | CGGCAGCTATTGATTGGACA | 3 | NC | NC | NC |
| 45 | 83 | TGTAGCTTACGCCATCCAGC | 2 | NC | NC | NC |
| 46 | 84 | CTGTAGCTTACGCCATCCAG | 2 | NC | NC | NC |
| 47 | 98 | CGTTCTTCCTTCAGCTGTAG | 2 | NC | NC | NC |
| 48 | 99 | ACGTTCTTCCTTCAGCTGTA | 2 | NC | NC | NC |
| 49 | 100 | CACGTTCTTCCTTCAGCTGT | 2 | NC | NC | NC |
| 50 | 101 | TCACGTTCTTCCTTCAGCTG | 2 | NC | NC | NC |
| 51 | 102 | CTCACGTTCTTCCTTCAGCT | 2 | NC | NC | NC |
| 52 | 103 | GCTCACGTTCTTCCTTCAGC | 2 | NC | NC | NC |
| 53 | 104 | TGCTCACGTTCTTCCTTCAG | 1 | NC | NC | NC |
| 54 | 105 | GTGCTCACGTTCTTCCTTCA | 2 | 2 | NC | NC |
| 55 | 130 | CTTCAGCCAATCACCTCAGT | 2 | NC | NC | NC |
| 56 | 131 | CCTTCAGCCAATCACCTCAG | 2 | NC | NC | NC |
| 57 | 132 | GCCTTCAGCCAATCACCTCA | 2 | NC | NC | NC |
| 58 | 153 | GTCTAGATGCTCAACGGAAG | 3 | 1 | NC | NC |
| 59 | 154 | CGTCTAGATGCTCAACGGAA | 2 | 1 | NC | NC |
| 60 | 155 | ACGTCTAGATGCTCAACGGA | 2 | 2 | NC | NC |
| 61 | 156 | AACGTCTAGATGCTCAACGG | 3 | 2 | NC | NC |
| 62 | 158 | GAAACGTCTAGATGCTCAAC | 3 | 2 | NC | NC |
| 63 | 159 | GGAAACGTCTAGATGCTCAA | 2 | 2 | NC | NC |
| 64 | 160 | AGGAAACGTCTAGATGCTCA | 2 | NC | NC | NC |
| 65 | 161 | AAGGAAACGTCTAGATGCTC | 2 | NC | NC | NC |
| 66 | 162 | CAAGGAAACGTCTAGATGCT | 3 | NC | NC | NC |
| 67 | 163 | CCAAGGAAACGTCTAGATGC | 2 | NC | NC | NC |
| 68 | 164 | GCCAAGGAAACGTCTAGATG | 3 | NC | NC | NC |
| 69 | 165 | AGCCAAGGAAACGTCTAGAT | 2 | NC | NC | NC |
| 70 | 166 | GAGCCAAGGAAACGTCTAGA | 2 | NC | NC | NC |
| 71 | 167 | AGAGCCAAGGAAACGTCTAG | 2 | NC | NC | NC |
| 72 | 168 | AAGAGCCAAGGAAACGTCTA | 2 | NC | NC | NC |
| 73 | 169 | GAAGAGCCAAGGAAACGTCT | 2 | NC | NC | NC |
| 74 | 170 | AGAAGAGCCAAGGAAACGTC | 2 | NC | NC | NC |
| 75 | 171 | CAGAAGAGCCAAGGAAACGT | 2 | NC | NC | NC |
| 76 | 172 | CCAGAAGAGCCAAGGAAACG | 1 | NC | NC | NC |
| 77 | 173 | GCCAGAAGAGCCAAGGAAAC | 1 | NC | NC | NC |
| 78 | 174 | CGCCAGAAGAGCCAAGGAAA | 2 | NC | NC | NC |
| 79 | 194 | TGCCACGAACGACATTTTGG | 2 | 1 | NC | NC |
| 80 | 195 | CTGCCACGAACGACATTTTG | 2 | 2 | NC | NC |
| 81 | 196 | CCTGCCACGAACGACATTTT | 2 | 2 | NC | NC |
| 82 | 197 | CCCTGCCACGAACGACATTT | 3 | 1 | NC | NC |
| 83 | 202 | ATAACCCCTGCCACGAACGA | 3 | 2 | NC | NC |
| 84 | 203 | AATAACCCCTGCCACGAACG | 2 | 2 | NC | NC |
| 85 | 204 | GAATAACCCCTGCCACGAAC | 2 | NC | NC | NC |
| 86 | 205 | CGAATAACCCCTGCCACGAA | 2 | 2 | NC | NC |
| 87 | 229 | TTCACCACTGTCTCGTCCAG | 2 | 2 | NC | NC |
| 88 | 230 | GTTCACCACTGTCTCGTCCA | 1 | 2 | NC | NC |
| 89 | 235 | ATGCGGTTCACCACTGTCTC | 2 | NC | NC | NC |
| 90 | 236 | GATGCGGTTCACCACTGTCT | 3 | 2 | NC | NC |
| 91 | 284 | CATCTCTTTGATAGCATTAG | 1 | 2 | NC | NC |
| 92 | 285 | TCATCTCTTTGATAGCATTA | 1 | 2 | NC | NC |
| 93 | 286 | ATCATCTCTTTGATAGCATT | 1 | 2 | 1 | NC |
| 94 | 287 | AATCATCTCTTTGATAGCAT | 2 | 2 | NC | NC |
| 95 | 288 | CAATCATCTCTTTGATAGCA | 2 | 2 | NC | NC |
| 96 | 289 | TCAATCATCTCTTTGATAGC | 2 | 2 | NC | NC |
| 97 | 290 | CTCAATCATCTCTTTGATAG | 2 | 2 | NC | NC |
| 98 | 291 | TCTCAATCATCTCTTTGATA | 1 | 2 | NC | NC |
| 99 | 292 | TTCTCAATCATCTCTTTGAT | 2 | 1 | NC | NC |
| 100 | 293 | GTTCTCAATCATCTCTTTGA | 2 | 2 | NC | NC |
| 101 | 294 | AGTTCTCAATCATCTCTTTG | 2 | 2 | NC | NC |
| 102 | 295 | CAGTTCTCAATCATCTCTTT | 1 | 1 | NC | NC |
| 103 | 296 | ACAGTTCTCAATCATCTCTT | 1 | NC | NC | NC |
| 104 | 297 | AACAGTTCTCAATCATCTCT | 2 | NC | NC | NC |
| 105 | 298 | AAACAGTTCTCAATCATCTC | 1 | NC | NC | NC |
| 106 | 299 | TAAACAGTTCTCAATCATCT | 2 | 2 | NC | NC |
| 107 | 300 | CTAAACAGTTCTCAATCATC | 2 | 2 | NC | NC |
| 108 | 301 | TCTAAACAGTTCTCAATCAT | 2 | 1 | NC | NC |
| 109 | 302 | ATCTAAACAGTTCTCAATCA | 2 | 2 | NC | NC |
| 110 | 303 | CATCTAAACAGTTCTCAATC | 2 | 2 | NC | NC |
| 111 | 304 | GCATCTAAACAGTTCTCAAT | 2 | 2 | NC | NC |
| 112 | 305 | TGCATCTAAACAGTTCTCAA | 1 | 2 | NC | NC |
| 113 | 306 | TTGCATCTAAACAGTTCTCA | 2 | 3 | NC | NC |
| 114 | 307 | TTTGCATCTAAACAGTTCTC | 2 | 2 | NC | NC |
| 115 | 308 | TTTTGCATCTAAACAGTTCT | 1 | 2 | NC | NC |
| 116 | 309 | ATTTTGCATCTAAACAGTTC | 1 | 2 | NC | NC |
| 117 | 310 | GATTTTGCATCTAAACAGTT | 1 | 1 | 2 | 2 |
| 118 | 311 | GGATTTTGCATCTAAACAGT | 2 | 2 | NC | NC |
| 119 | 312 | TGGATTTTGCATCTAAACAG | 2 | 2 | NC | NC |
| 120 | 313 | GTGGATTTTGCATCTAAACA | 3 | 2 | NC | NC |
| 121 | 314 | TGTGGATTTTGCATCTAAAC | 2 | 2 | NC | NC |
| 122 | 315 | TTGTGGATTTTGCATCTAAA | 2 | 2 | NC | NC |
| 123 | 316 | CTTGTGGATTTTGCATCTAA | 2 | 2 | NC | NC |
| 124 | 317 | ACTTGTGGATTTTGCATCTA | 2 | 2 | NC | NC |
| 125 | 318 | TACTTGTGGATTTTGCATCT | 2 | 2 | NC | NC |
| 126 | 319 | ATACTTGTGGATTTTGCATC | 2 | 2 | NC | NC |
| 127 | 320 | AATACTTGTGGATTTTGCAT | 2 | NC | NC | NC |
| 128 | 321 | GAATACTTGTGGATTTTGCA | 1 | NC | NC | NC |
| 129 | 322 | TGAATACTTGTGGATTTTGC | 2 | 2 | NC | NC |
| 130 | 323 | TTGAATACTTGTGGATTTTG | 2 | 2 | NC | NC |
| 131 | 324 | CTTGAATACTTGTGGATTTT | 2 | 2 | NC | NC |
| 132 | 325 | ACTTGAATACTTGTGGATTT | 2 | NC | NC | NC |
| 133 | 326 | CACTTGAATACTTGTGGATT | 2 | 2 | NC | NC |
| 134 | 327 | TCACTTGAATACTTGTGGAT | 1 | 3 | NC | NC |
| 135 | 328 | ATCACTTGAATACTTGTGGA | 2 | 2 | NC | NC |
| 136 | 329 | AATCACTTGAATACTTGTGG | 2 | 1 | NC | NC |
| 137 | 330 | CAATCACTTGAATACTTGTG | 2 | 2 | NC | NC |
| 138 | 331 | ACAATCACTTGAATACTTGT | 2 | 2 | NC | NC |
| 139 | 332 | AACAATCACTTGAATACTTG | 1 | 2 | NC | NC |
| 140 | 333 | TAACAATCACTTGAATACTT | 2 | 1 | NC | NC |
| 141 | 334 | TTAACAATCACTTGAATACT | 1 | 2 | NC | NC |
| 142 | 335 | TTTAACAATCACTTGAATAC | 2 | 2 | NC | NC |
| 143 | 336 | CTTTAACAATCACTTGAATA | 2 | 2 | NC | NC |
| 144 | 337 | TCTTTAACAATCACTTGAAT | 2 | 2 | NC | NC |
| 145 | 338 | CTCTTTAACAATCACTTGAA | 2 | NC | NC | NC |
| 146 | 339 | CCTCTTTAACAATCACTTGA | 2 | 2 | NC | NC |
| 147 | 341 | TCCCTCTTTAACAATCACTT | 2 | 2 | NC | NC |
| 148 | 342 | CTCCCTCTTTAACAATCACT | 2 | 2 | NC | NC |
| 149 | 343 | CCTCCCTCTTTAACAATCAC | 2 | 2 | NC | NC |
| 150 | 344 | GCCTCCCTCTTTAACAATCA | 2 | 2 | NC | NC |
| 151 | 345 | GGCCTCCCTCTTTAACAATC | 2 | 2 | NC | NC |
| 152 | 346 | AGGCCTCCCTCTTTAACAAT | 2 | 2 | NC | NC |
| 153 | 357 | GAATCAACTTCAGGCCTCCC | 2 | 2 | NC | NC |
| 154 | 358 | TGAATCAACTTCAGGCCTCC | 2 | 3 | NC | NC |
| 155 | 366 | CTTGGATCTGAATCAACTTC | 2 | 2 | NC | NC |
| 156 | 367 | TCTTGGATCTGAATCAACTT | 2 | 2 | NC | NC |
| 157 | 368 | GTCTTGGATCTGAATCAACT | 2 | 1 | NC | NC |
| 158 | 369 | TGTCTTGGATCTGAATCAAC | 2 | 3 | NC | NC |
| 159 | 370 | TTGTCTTGGATCTGAATCAA | 2 | 2 | NC | NC |
| 160 | 371 | ATTGTCTTGGATCTGAATCA | 2 | 2 | NC | NC |
| 161 | 372 | CATTGTCTTGGATCTGAATC | 1 | NC | NC | NC |
| 162 | 382 | ATCCCGGTGCCATTGTCTTG | 2 | NC | NC | NC |
| 163 | 383 | GATCCCGGTGCCATTGTCTT | 2 | NC | NC | NC |
| 164 | 384 | TGATCCCGGTGCCATTGTCT | 3 | NC | NC | NC |
| 165 | 388 | TTCCTGATCCCGGTGCCATT | 3 | NC | NC | NC |
| 166 | 389 | TTTCCTGATCCCGGTGCCAT | 3 | NC | NC | NC |
| 167 | 392 | TTCTTTCCTGATCCCGGTGC | 2 | NC | NC | NC |
| 168 | 393 | CTTCTTTCCTGATCCCGGTG | 2 | NC | NC | NC |
| 169 | 394 | TCTTCTTTCCTGATCCCGGT | 2 | NC | NC | NC |
| 170 | 395 | ATCTTCTTTCCTGATCCCGG | 3 | NC | NC | NC |
| 171 | 396 | GATCTTCTTTCCTGATCCCG | 3 | NC | NC | NC |
| 172 | 397 | AGATCTTCTTTCCTGATCCC | 2 | 2 | NC | NC |
| 173 | 398 | CAGATCTTCTTTCCTGATCC | 2 | NC | NC | NC |
| 174 | 399 | CCAGATCTTCTTTCCTGATC | 2 | NC | NC | NC |
| 175 | 400 | TCCAGATCTTCTTTCCTGAT | 1 | 3 | NC | NC |
| 176 | 401 | ATCCAGATCTTCTTTCCTGA | 2 | 2 | NC | NC |
| 177 | 402 | TATCCAGATCTTCTTTCCTG | 2 | 1 | NC | NC |
| 178 | 403 | ATATCCAGATCTTCTTTCCT | 1 | 2 | NC | NC |
| 179 | 404 | AATATCCAGATCTTCTTTCC | 2 | 2 | NC | NC |
| 180 | 405 | CAATATCCAGATCTTCTTTC | 1 | 2 | NC | NC |
| 181 | 406 | ACAATATCCAGATCTTCTTT | 1 | 2 | NC | NC |
| 182 | 407 | TACAATATCCAGATCTTCTT | 2 | 2 | NC | NC |
| 183 | 408 | ATACAATATCCAGATCTTCT | 2 | 2 | NC | NC |
| 184 | 409 | CATACAATATCCAGATCTTC | 2 | 2 | NC | NC |
| 185 | 410 | ACATACAATATCCAGATCTT | 2 | 2 | NC | NC |
| 186 | 411 | CACATACAATATCCAGATCT | 2 | 2 | NC | NC |
| 187 | 412 | TCACATACAATATCCAGATC | 2 | 2 | NC | NC |
| 188 | 413 | TTCACATACAATATCCAGAT | 2 | 1 | NC | NC |
| 189 | 414 | TTTCACATACAATATCCAGA | 2 | 2 | NC | NC |
| 190 | 415 | CTTTCACATACAATATCCAG | 2 | 1 | NC | NC |
| 191 | 416 | CCTTTCACATACAATATCCA | 2 | 2 | NC | NC |
| 192 | 417 | ACCTTTCACATACAATATCC | 2 | 2 | NC | NC |
| 193 | 418 | AACCTTTCACATACAATATC | 2 | 2 | NC | NC |
| 194 | 419 | GAACCTTTCACATACAATAT | 2 | 2 | NC | NC |
| 195 | 420 | TGAACCTTTCACATACAATA | 2 | 2 | NC | NC |
| 196 | 430 | TTACTAGTAGTGAACCTTTC | 2 | NC | NC | NC |
| 197 | 431 | TTTACTAGTAGTGAACCTTT | 2 | NC | NC | NC |
| 198 | 432 | GTTTACTAGTAGTGAACCTT | 2 | NC | NC | NC |
| 199 | 436 | TGCAGTTTACTAGTAGTGAA | 1 | NC | NC | NC |
| 200 | 437 | CTGCAGTTTACTAGTAGTGA | 2 | NC | NC | NC |
| 201 | 438 | ACTGCAGTTTACTAGTAGTG | 2 | NC | NC | NC |
| 202 | 439 | GACTGCAGTTTACTAGTAGT | 2 | NC | NC | NC |
| 203 | 440 | GGACTGCAGTTTACTAGTAG | 2 | NC | NC | NC |
| 204 | 441 | AGGACTGCAGTTTACTAGTA | 1 | NC | NC | NC |
| 205 | 442 | AAGGACTGCAGTTTACTAGT | 1 | NC | NC | NC |
| 206 | 443 | AAAGGACTGCAGTTTACTAG | 2 | NC | NC | NC |
| 207 | 444 | CAAAGGACTGCAGTTTACTA | 1 | NC | NC | NC |
| 208 | 445 | TCAAAGGACTGCAGTTTACT | 2 | 2 | NC | NC |
| 209 | 446 | CTCAAAGGACTGCAGTTTAC | 2 | 2 | NC | NC |
| 210 | 447 | CCTCAAAGGACTGCAGTTTA | 2 | 2 | NC | NC |
| 211 | 448 | TCCTCAAAGGACTGCAGTTT | 2 | 2 | NC | NC |
| 212 | 458 | ACTGGCTAAATCCTCAAAGG | 2 | 2 | NC | NC |
| 213 | 459 | TACTGGCTAAATCCTCAAAG | 2 | 2 | NC | NC |
| 214 | 460 | ATACTGGCTAAATCCTCAAA | 2 | 2 | 2 | NC |
| 215 | 461 | AATACTGGCTAAATCCTCAA | 2 | 2 | 2 | NC |
| 216 | 462 | AAATACTGGCTAAATCCTCA | 2 | 1 | 2 | NC |
| 217 | 463 | GAAATACTGGCTAAATCCTC | 3 | 2 | 2 | NC |
| 218 | 464 | AGAAATACTGGCTAAATCCT | 2 | 2 | 2 | NC |
| 219 | 465 | TAGAAATACTGGCTAAATCC | 2 | 2 | 2 | NC |
| 220 | 466 | GTAGAAATACTGGCTAAATC | 2 | 2 | 2 | NC |
| 221 | 467 | GGTAGAAATACTGGCTAAAT | 2 | 2 | 2 | NC |
| 222 | 468 | AGGTAGAAATACTGGCTAAA | 1 | 2 | 1 | NC |
| 223 | 469 | TAGGTAGAAATACTGGCTAA | 1 | 2 | 2 | NC |
| 224 | 470 | ATAGGTAGAAATACTGGCTA | 2 | 3 | 2 | NC |
| 225 | 471 | CATAGGTAGAAATACTGGCT | 2 | 2 | 2 | NC |
| 226 | 472 | CCATAGGTAGAAATACTGGC | 2 | 3 | 2 | NC |
| 227 | 473 | GCCATAGGTAGAAATACTGG | 1 | 2 | 2 | NC |
| 228 | 474 | AGCCATAGGTAGAAATACTG | 1 | NC | 2 | NC |
| 229 | 475 | AAGCCATAGGTAGAAATACT | 2 | 2 | 2 | NC |
| 230 | 476 | AAAGCCATAGGTAGAAATAC | 2 | 3 | 2 | NC |
| 231 | 477 | GAAAGCCATAGGTAGAAATA | 2 | 1 | 1 | NC |
| 232 | 478 | CGAAAGCCATAGGTAGAAAT | 2 | 2 | 1 | NC |
| 233 | 479 | TCGAAAGCCATAGGTAGAAA | 2 | 2 | NC | NC |
| 234 | 480 | CTCGAAAGCCATAGGTAGAA | 2 | 2 | NC | NC |
| 235 | 481 | CCTCGAAAGCCATAGGTAGA | 2 | 2 | NC | NC |
| 236 | 485 | CTCACCTCGAAAGCCATAGG | 2 | 2 | NC | NC |
| 237 | 486 | CCTCACCTCGAAAGCCATAG | 2 | 2 | NC | NC |
| 238 | 487 | GCCTCACCTCGAAAGCCATA | 2 | 1 | NC | NC |
| 239 | 488 | AGCCTCACCTCGAAAGCCAT | 2 | 2 | NC | NC |
| 240 | 489 | AAGCCTCACCTCGAAAGCCA | 2 | 2 | NC | NC |
| 241 | 490 | AAAGCCTCACCTCGAAAGCC | 2 | 1 | NC | NC |
| 242 | 491 | CAAAGCCTCACCTCGAAAGC | 2 | 1 | NC | NC |
| 243 | 492 | CCAAAGCCTCACCTCGAAAG | 2 | 2 | NC | NC |
| 244 | 493 | GCCAAAGCCTCACCTCGAAA | 2 | 2 | NC | NC |
| 245 | 525 | TAATAGTAACATGAGCCACA | 2 | 2 | NC | NC |
| 246 | 526 | GTAATAGTAACATGAGCCAC | 2 | 1 | NC | NC |
| 247 | 527 | TGTAATAGTAACATGAGCCA | 2 | 3 | NC | NC |
| 248 | 528 | TTGTAATAGTAACATGAGCC | 2 | 2 | NC | NC |
| 249 | 529 | GTTGTAATAGTAACATGAGC | 2 | 2 | NC | NC |
| 250 | 530 | CGTTGTAATAGTAACATGAG | 3 | NC | NC | NC |
| 251 | 531 | TCGTTGTAATAGTAACATGA | 2 | NC | NC | NC |
| 252 | 532 | TTCGTTGTAATAGTAACATG | 2 | NC | NC | NC |
| 253 | 533 | TTTCGTTGTAATAGTAACAT | 2 | NC | NC | NC |
| 254 | 534 | TTTTCGTTGTAATAGTAACA | 3 | NC | NC | NC |
| 255 | 535 | GTTTTCGTTGTAATAGTAAC | 2 | NC | NC | NC |
| 256 | 536 | TGTTTTCGTTGTAATAGTAA | 2 | NC | NC | NC |
| 257 | 537 | CTGTTTTCGTTGTAATAGTA | 2 | NC | NC | NC |
| 258 | 538 | GCTGTTTTCGTTGTAATAGT | 2 | NC | NC | NC |
| 259 | 539 | AGCTGTTTTCGTTGTAATAG | 2 | NC | NC | NC |
| 260 | 540 | CAGCTGTTTTCGTTGTAATA | 2 | NC | NC | NC |
| 261 | 541 | TCAGCTGTTTTCGTTGTAAT | 2 | NC | NC | NC |
| 262 | 542 | ATCAGCTGTTTTCGTTGTAA | 2 | NC | NC | NC |
| 263 | 543 | CATCAGCTGTTTTCGTTGTA | 3 | NC | NC | NC |
| 264 | 544 | CCATCAGCTGTTTTCGTTGT | 3 | NC | NC | NC |
| 265 | 545 | TCCATCAGCTGTTTTCGTTG | 2 | NC | NC | NC |
| 266 | 546 | TTCCATCAGCTGTTTTCGTT | 2 | NC | NC | NC |
| 267 | 547 | TTTCCATCAGCTGTTTTCGT | 2 | NC | NC | NC |
| 268 | 548 | CTTTCCATCAGCTGTTTTCG | 2 | NC | NC | NC |
| 269 | 549 | ACTTTCCATCAGCTGTTTTC | 2 | NC | NC | NC |
| 270 | 550 | CACTTTCCATCAGCTGTTTT | 2 | 2 | NC | NC |
| 271 | 551 | ACACTTTCCATCAGCTGTTT | 2 | 2 | NC | NC |
| 272 | 552 | CACACTTTCCATCAGCTGTT | 1 | 2 | NC | NC |
| 273 | 553 | GCACACTTTCCATCAGCTGT | 2 | NC | NC | NC |
| 274 | 554 | TGCACACTTTCCATCAGCTG | 2 | 2 | NC | NC |
| 275 | 555 | ATGCACACTTTCCATCAGCT | 2 | 2 | NC | NC |
| 276 | 556 | TATGCACACTTTCCATCAGC | 2 | 1 | NC | NC |
| 277 | 557 | GTATGCACACTTTCCATCAG | 2 | 2 | NC | NC |
| 278 | 558 | TGTATGCACACTTTCCATCA | 2 | 1 | NC | NC |
| 279 | 559 | CTGTATGCACACTTTCCATC | 2 | 2 | NC | NC |
| 280 | 560 | TCTGTATGCACACTTTCCAT | 1 | 2 | NC | NC |
| 281 | 561 | CTCTGTATGCACACTTTCCA | 1 | NC | NC | NC |
| 282 | 562 | GCTCTGTATGCACACTTTCC | 1 | 1 | NC | NC |
| 283 | 563 | TGCTCTGTATGCACACTTTC | 2 | NC | NC | NC |
| 284 | 571 | GAGTAACTTGCTCTGTATGC | 2 | 2 | NC | NC |
| 285 | 572 | TGAGTAACTTGCTCTGTATG | 2 | 2 | NC | NC |
| 286 | 573 | CTGAGTAACTTGCTCTGTAT | 2 | 2 | NC | NC |
| 287 | 574 | TCTGAGTAACTTGCTCTGTA | 1 | 2 | 2 | 2 |
| 288 | 575 | ATCTGAGTAACTTGCTCTGT | 2 | 2 | 2 | 2 |
| 289 | 576 | CATCTGAGTAACTTGCTCTG | 2 | 2 | 2 | 2 |
| 290 | 577 | CCATCTGAGTAACTTGCTCT | 2 | 2 | 2 | 2 |
| 291 | 578 | TCCATCTGAGTAACTTGCTC | 2 | 2 | 2 | 3 |
| 292 | 579 | TTCCATCTGAGTAACTTGCT | 2 | 2 | 2 | 3 |
| 293 | 580 | TTTCCATCTGAGTAACTTGC | 2 | 2 | 2 | 3 |
| 294 | 581 | TTTTCCATCTGAGTAACTTG | 1 | 2 | NC | NC |
| 295 | 582 | GTTTTCCATCTGAGTAACTT | 2 | 2 | NC | NC |
| 296 | 583 | AGTTTTCCATCTGAGTAACT | 2 | 2 | NC | NC |
| 297 | 584 | CAGTTTTCCATCTGAGTAAC | 2 | 2 | NC | NC |
| 298 | 585 | TCAGTTTTCCATCTGAGTAA | 2 | 2 | NC | NC |
| 299 | 590 | GGCTTTCAGTTTTCCATCTG | 1 | NC | NC | NC |
| 300 | 591 | GGGCTTTCAGTTTTCCATCT | 1 | NC | NC | NC |
| 301 | 609 | CAGCACATGGTTTAGGAGGG | 2 | NC | NC | NC |
| 302 | 620 | CCCTTGATTGCCAGCACATG | 2 | 2 | NC | NC |
| 303 | 621 | TCCCTTGATTGCCAGCACAT | 2 | 2 | NC | NC |
| 304 | 622 | GTCCCTTGATTGCCAGCACA | 2 | 2 | NC | NC |
| 305 | 627 | TCTGGGTCCCTTGATTGCCA | 2 | 2 | NC | NC |
| 306 | 628 | ATCTGGGTCCCTTGATTGCC | 2 | NC | NC | NC |
| 307 | 629 | GATCTGGGTCCCTTGATTGC | 3 | 2 | NC | NC |
| 308 | 630 | TGATCTGGGTCCCTTGATTG | 2 | 2 | NC | NC |
| 309 | 631 | GTGATCTGGGTCCCTTGATT | 2 | NC | NC | NC |
| 310 | 632 | CGTGATCTGGGTCCCTTGAT | 2 | 2 | NC | NC |
| 311 | 663 | TCGTGGCTATGTTGTAAAAA | 3 | 2 | NC | NC |
| 312 | 664 | CTCGTGGCTATGTTGTAAAA | 2 | 1 | NC | NC |
| 313 | 665 | CCTCGTGGCTATGTTGTAAA | 2 | 2 | NC | NC |
| 314 | 666 | TCCTCGTGGCTATGTTGTAA | 2 | 2 | NC | NC |
| 315 | 667 | CTCCTCGTGGCTATGTTGTA | 3 | 2 | NC | NC |
| 316 | 668 | TCTCCTCGTGGCTATGTTGT | 2 | 3 | NC | NC |
| 317 | 669 | TTCTCCTCGTGGCTATGTTG | 2 | 2 | NC | NC |
| 318 | 670 | TTTCTCCTCGTGGCTATGTT | 2 | 2 | NC | NC |
| 319 | 671 | TTTTCTCCTCGTGGCTATGT | 2 | 2 | NC | NC |
| 320 | 672 | CTTTTCTCCTCGTGGCTATG | 2 | 2 | NC | NC |
| 321 | 673 | GCTTTTCTCCTCGTGGCTAT | 2 | NC | NC | NC |
| 322 | 674 | AGCTTTTCTCCTCGTGGCTA | 2 | 2 | NC | NC |
| 323 | 675 | AAGCTTTTCTCCTCGTGGCT | 2 | 2 | NC | NC |
| 324 | 676 | AAAGCTTTTCTCCTCGTGGC | 2 | 1 | NC | NC |
| 325 | 677 | TAAAGCTTTTCTCCTCGTGG | 2 | 2 | NC | NC |
| 326 | 678 | TTAAAGCTTTTCTCCTCGTG | 3 | 2 | NC | NC |
| 327 | 679 | TTTAAAGCTTTTCTCCTCGT | 2 | 2 | NC | NC |
| 328 | 680 | TTTTAAAGCTTTTCTCCTCG | 2 | 2 | NC | NC |
| 329 | 681 | TTTTTAAAGCTTTTCTCCTC | 1 | 1 | NC | NC |
| 330 | 697 | TATTCTTCACTTGGATTTTT | 1 | 2 | NC | NC |
| 331 | 698 | ATATTCTTCACTTGGATTTT | 1 | 1 | NC | NC |
| 332 | 699 | CATATTCTTCACTTGGATTT | 2 | 2 | NC | NC |
| 333 | 700 | CCATATTCTTCACTTGGATT | 2 | 2 | NC | NC |
| 334 | 701 | CCCATATTCTTCACTTGGAT | 2 | 2 | NC | NC |
| 335 | 702 | TCCCATATTCTTCACTTGGA | 2 | 3 | NC | NC |
| 336 | 703 | TTCCCATATTCTTCACTTGG | 2 | 2 | NC | NC |
| 337 | 704 | TTTCCCATATTCTTCACTTG | 2 | 2 | NC | NC |
| 338 | 705 | TTTTCCCATATTCTTCACTT | 1 | 2 | NC | NC |
| 339 | 706 | ATTTTCCCATATTCTTCACT | 1 | NC | NC | NC |
| 340 | 707 | AATTTTCCCATATTCTTCAC | 1 | 2 | NC | NC |
| 341 | 708 | AAATTTTCCCATATTCTTCA | 1 | 2 | NC | NC |
| 342 | 709 | AAAATTTTCCCATATTCTTC | 2 | 2 | NC | NC |
| 343 | 710 | CAAAATTTTCCCATATTCTT | 1 | 1 | NC | NC |
| 344 | 711 | CCAAAATTTTCCCATATTCT | 1 | 2 | NC | NC |
| 345 | 712 | TCCAAAATTTTCCCATATTC | 2 | 2 | NC | NC |
| 346 | 713 | TTCCAAAATTTTCCCATATT | 1 | 1 | NC | NC |
| 347 | 714 | CTTCCAAAATTTTCCCATAT | 2 | NC | NC | NC |
| 348 | 715 | ACTTCCAAAATTTTCCCATA | 2 | NC | NC | NC |
| 349 | 716 | AACTTCCAAAATTTTCCCAT | 1 | NC | NC | NC |
| 350 | 717 | CAACTTCCAAAATTTTCCCA | 2 | NC | NC | NC |
| 351 | 718 | ACAACTTCCAAAATTTTCCC | 1 | NC | NC | NC |
| 352 | 719 | AACAACTTCCAAAATTTTCC | 2 | NC | NC | NC |
| 353 | 720 | CAACAACTTCCAAAATTTTC | 2 | NC | NC | NC |
| 354 | 721 | CCAACAACTTCCAAAATTTT | 1 | NC | NC | NC |
| 355 | 722 | GCCAACAACTTCCAAAATTT | 1 | NC | NC | NC |
| 356 | 723 | TGCCAACAACTTCCAAAATT | 1 | NC | NC | NC |
| 357 | 724 | CTGCCAACAACTTCCAAAAT | 1 | NC | NC | NC |
| 358 | 725 | CCTGCCAACAACTTCCAAAA | 1 | NC | NC | NC |
| 359 | 726 | ACCTGCCAACAACTTCCAAA | 1 | NC | NC | NC |
| 360 | 727 | TACCTGCCAACAACTTCCAA | 2 | NC | NC | NC |
| 361 | 728 | ATACCTGCCAACAACTTCCA | 1 | NC | NC | NC |
| 362 | 729 | AATACCTGCCAACAACTTCC | 1 | NC | NC | NC |
| 363 | 730 | GAATACCTGCCAACAACTTC | 1 | NC | NC | NC |
| 364 | 731 | TGAATACCTGCCAACAACTT | 2 | NC | NC | NC |
| 365 | 732 | CTGAATACCTGCCAACAACT | 1 | NC | NC | NC |
| 366 | 733 | ACTGAATACCTGCCAACAAC | 1 | NC | NC | NC |
| 367 | 734 | TACTGAATACCTGCCAACAA | 2 | NC | NC | NC |
| 368 | 735 | GTACTGAATACCTGCCAACA | 2 | NC | NC | NC |
| 369 | 736 | TGTACTGAATACCTGCCAAC | 1 | NC | NC | NC |
| 370 | 737 | GTGTACTGAATACCTGCCAA | 2 | NC | NC | NC |
| 371 | 738 | TGTGTACTGAATACCTGCCA | 1 | NC | NC | NC |
| 372 | 739 | TTGTGTACTGAATACCTGCC | 2 | NC | NC | NC |
| 373 | 740 | ATTGTGTACTGAATACCTGC | 2 | NC | NC | NC |
| 374 | 741 | CATTGTGTACTGAATACCTG | 2 | NC | NC | NC |
| 375 | 742 | GCATTGTGTACTGAATACCT | 2 | NC | NC | NC |
| 376 | 743 | TGCATTGTGTACTGAATACC | 2 | NC | NC | NC |
| 377 | 744 | CTGCATTGTGTACTGAATAC | 2 | NC | NC | NC |
| 378 | 745 | CCTGCATTGTGTACTGAATA | 2 | NC | NC | NC |
| 379 | 746 | GCCTGCATTGTGTACTGAAT | 1 | NC | NC | NC |
| 380 | 747 | TGCCTGCATTGTGTACTGAA | 1 | NC | NC | NC |
| 381 | 748 | ATGCCTGCATTGTGTACTGA | 2 | NC | NC | NC |
| 382 | 759 | CTGAGAAACTAATGCCTGCA | 1 | 2 | NC | NC |
| 383 | 760 | ACTGAGAAACTAATGCCTGC | 2 | 2 | NC | NC |
| 384 | 761 | AACTGAGAAACTAATGCCTG | 2 | 2 | 2 | NC |
| 385 | 762 | TAACTGAGAAACTAATGCCT | 2 | 2 | 2 | NC |
| 386 | 763 | TTAACTGAGAAACTAATGCC | 1 | NC | 2 | NC |
| 387 | 764 | TTTAACTGAGAAACTAATGC | 1 | 1 | 2 | NC |
| 388 | 765 | TTTTAACTGAGAAACTAATG | 1 | 2 | 2 | NC |
| 389 | 782 | TACTGTCTCTCCTTGTTTTT | 2 | NC | NC | NC |
| 390 | 783 | CTACTGTCTCTCCTTGTTTT | 2 | NC | NC | NC |
| 391 | 784 | GCTACTGTCTCTCCTTGTTT | 2 | NC | NC | NC |
| 392 | 785 | AGCTACTGTCTCTCCTTGTT | 2 | NC | NC | NC |
| 393 | 786 | CAGCTACTGTCTCTCCTTGT | 2 | NC | NC | NC |
| 394 | 787 | TCAGCTACTGTCTCTCCTTG | 2 | NC | NC | NC |
| 395 | 788 | ATCAGCTACTGTCTCTCCTT | 2 | NC | NC | NC |
| 396 | 789 | CATCAGCTACTGTCTCTCCT | 2 | NC | NC | NC |
| 397 | 790 | ACATCAGCTACTGTCTCTCC | 2 | 3 | NC | NC |
| 398 | 791 | AACATCAGCTACTGTCTCTC | 2 | 2 | NC | NC |
| 399 | 792 | TAACATCAGCTACTGTCTCT | 2 | 2 | NC | NC |
| 400 | 793 | CTAACATCAGCTACTGTCTC | 2 | 2 | NC | NC |
| 401 | 794 | CCTAACATCAGCTACTGTCT | 2 | 2 | NC | NC |
| 402 | 795 | TCCTAACATCAGCTACTGTC | 2 | 2 | NC | NC |
| 403 | 796 | GTCCTAACATCAGCTACTGT | 2 | NC | NC | NC |
| 404 | 797 | TGTCCTAACATCAGCTACTG | 2 | NC | NC | NC |
| 405 | 798 | GTGTCCTAACATCAGCTACT | 2 | 2 | NC | NC |
| 406 | 799 | AGTGTCCTAACATCAGCTAC | 2 | 2 | NC | NC |
| 407 | 800 | TAGTGTCCTAACATCAGCTA | 3 | 3 | NC | NC |
| 408 | 801 | GTAGTGTCCTAACATCAGCT | 3 | 1 | NC | NC |
| 409 | 802 | GGTAGTGTCCTAACATCAGC | 2 | 2 | NC | NC |
| 410 | 803 | GGGTAGTGTCCTAACATCAG | 2 | 2 | NC | NC |
| 411 | 804 | TGGGTAGTGTCCTAACATCA | 2 | 2 | NC | NC |
| 412 | 805 | TTGGGTAGTGTCCTAACATC | 2 | 1 | NC | NC |
| 413 | 806 | ATTGGGTAGTGTCCTAACAT | 2 | 1 | NC | NC |
| 414 | 807 | CATTGGGTAGTGTCCTAACA | 2 | NC | NC | NC |
| 415 | 808 | GCATTGGGTAGTGTCCTAAC | 3 | 1 | NC | NC |
| 416 | 809 | GGCATTGGGTAGTGTCCTAA | 2 | 2 | NC | NC |
| 417 | 810 | AGGCATTGGGTAGTGTCCTA | 2 | 3 | NC | NC |
| 418 | 811 | GAGGCATTGGGTAGTGTCCT | 2 | 3 | NC | NC |
| 419 | 812 | TGAGGCATTGGGTAGTGTCC | 2 | 3 | NC | NC |
| 420 | 813 | TTGAGGCATTGGGTAGTGTC | 2 | 2 | NC | NC |
| 421 | 814 | GTTGAGGCATTGGGTAGTGT | 2 | 2 | NC | NC |
| 422 | 815 | GGTTGAGGCATTGGGTAGTG | 2 | NC | NC | NC |
| 423 | 816 | CGGTTGAGGCATTGGGTAGT | 3 | NC | NC | NC |
| 424 | 817 | ACGGTTGAGGCATTGGGTAG | 3 | NC | NC | NC |
| 425 | 818 | CACGGTTGAGGCATTGGGTA | 2 | NC | NC | NC |
| 426 | 822 | TGTCCACGGTTGAGGCATTG | 2 | NC | NC | NC |
| 427 | 823 | TTGTCCACGGTTGAGGCATT | 3 | NC | NC | NC |
| 428 | 824 | ATTGTCCACGGTTGAGGCAT | 2 | NC | NC | NC |
| 429 | 825 | TATTGTCCACGGTTGAGGCA | 3 | NC | NC | NC |
| 430 | 826 | ATATTGTCCACGGTTGAGGC | 3 | NC | NC | NC |
| 431 | 827 | AATATTGTCCACGGTTGAGG | 2 | NC | NC | NC |
| 432 | 828 | GAATATTGTCCACGGTTGAG | 3 | NC | NC | NC |
| 433 | 829 | CGAATATTGTCCACGGTTGA | 3 | NC | NC | NC |
| 434 | 830 | GCGAATATTGTCCACGGTTG | 3 | NC | NC | NC |
| 435 | 831 | AGCGAATATTGTCCACGGTT | 3 | NC | NC | NC |
| 436 | 833 | GGAGCGAATATTGTCCACGG | 2 | NC | NC | NC |
| 437 | 834 | TGGAGCGAATATTGTCCACG | 3 | NC | NC | NC |
| 438 | 837 | AGATGGAGCGAATATTGTCC | 2 | 2 | NC | NC |
| 439 | 838 | AAGATGGAGCGAATATTGTC | 1 | NC | NC | NC |
| 440 | 839 | AAAGATGGAGCGAATATTGT | 1 | 2 | NC | NC |
| 441 | 840 | CAAAGATGGAGCGAATATTG | 2 | 1 | NC | NC |
| 442 | 852 | TAACAGCATTTCCAAAGATG | 1 | 2 | NC | NC |
| 443 | 853 | CTAACAGCATTTCCAAAGAT | 2 | 1 | NC | NC |
| 444 | 854 | ACTAACAGCATTTCCAAAGA | 2 | 2 | NC | NC |
| 445 | 855 | GACTAACAGCATTTCCAAAG | 2 | 1 | NC | NC |
| 446 | 856 | CGACTAACAGCATTTCCAAA | 2 | 2 | NC | NC |
| 447 | 857 | TCGACTAACAGCATTTCCAA | 2 | 2 | NC | NC |
| 448 | 858 | CTCGACTAACAGCATTTCCA | 2 | 2 | NC | NC |
| 449 | 859 | TCTCGACTAACAGCATTTCC | 2 | 2 | NC | NC |
| 450 | 860 | TTCTCGACTAACAGCATTTC | 1 | 1 | NC | NC |
| 451 | 861 | GTTCTCGACTAACAGCATTT | 2 | 2 | NC | NC |
| 452 | 862 | AGTTCTCGACTAACAGCATT | 2 | NC | NC | NC |
| 453 | 863 | CAGTTCTCGACTAACAGCAT | 2 | 2 | NC | NC |
| 454 | 864 | TCAGTTCTCGACTAACAGCA | 2 | 2 | NC | NC |
| 455 | 865 | ATCAGTTCTCGACTAACAGC | 3 | 1 | NC | NC |
| 456 | 866 | TATCAGTTCTCGACTAACAG | 2 | 2 | NC | NC |
| 457 | 867 | CTATCAGTTCTCGACTAACA | 2 | NC | NC | NC |
| 458 | 868 | TCTATCAGTTCTCGACTAAC | 2 | 3 | 1 | NC |
| 459 | 869 | TTCTATCAGTTCTCGACTAA | 3 | 2 | 1 | NC |
| 460 | 870 | TTTCTATCAGTTCTCGACTA | 2 | 2 | NC | NC |
| 461 | 872 | AATTTCTATCAGTTCTCGAC | 1 | 1 | NC | NC |
| 462 | 873 | CAATTTCTATCAGTTCTCGA | 2 | 2 | NC | NC |
| 463 | 874 | CCAATTTCTATCAGTTCTCG | 2 | 3 | NC | NC |
| 464 | 875 | TCCAATTTCTATCAGTTCTC | 2 | 2 | NC | NC |
| 465 | 876 | ATCCAATTTCTATCAGTTCT | 2 | 1 | NC | NC |
| 466 | 877 | CATCCAATTTCTATCAGTTC | 3 | 1 | NC | NC |
| 467 | 878 | ACATCCAATTTCTATCAGTT | 2 | 2 | NC | NC |
| 468 | 879 | CACATCCAATTTCTATCAGT | 1 | 1 | NC | NC |
| 469 | 880 | TCACATCCAATTTCTATCAG | 1 | 2 | NC | NC |
| 470 | 881 | CTCACATCCAATTTCTATCA | 1 | 1 | NC | NC |
| 471 | 882 | CCTCACATCCAATTTCTATC | 1 | 2 | NC | NC |
| 472 | 883 | TCCTCACATCCAATTTCTAT | 1 | 2 | NC | NC |
| 473 | 884 | ATCCTCACATCCAATTTCTA | 2 | 2 | NC | NC |
| 474 | 885 | TATCCTCACATCCAATTTCT | 2 | 2 | NC | NC |
| 475 | 886 | TTATCCTCACATCCAATTTC | 2 | NC | NC | NC |
| 476 | 887 | TTTATCCTCACATCCAATTT | 2 | 1 | NC | NC |
| 477 | 888 | TTTTATCCTCACATCCAATT | 2 | 2 | NC | NC |
| 478 | 889 | GTTTTATCCTCACATCCAAT | 2 | 2 | NC | NC |
| 479 | 890 | GGTTTTATCCTCACATCCAA | 1 | 1 | NC | NC |
| 480 | 891 | GGGTTTTATCCTCACATCCA | 1 | 1 | NC | NC |
| 481 | 892 | AGGGTTTTATCCTCACATCC | 1 | 2 | NC | NC |
| 482 | 893 | TAGGGTTTTATCCTCACATC | 2 | 2 | NC | NC |
| 483 | 894 | CTAGGGTTTTATCCTCACAT | 2 | 2 | NC | NC |
| 484 | 895 | GCTAGGGTTTTATCCTCACA | 3 | 2 | 2 | 2 |
| 485 | 896 | GGCTAGGGTTTTATCCTCAC | 2 | 2 | NC | NC |
| 486 | 897 | AGGCTAGGGTTTTATCCTCA | 2 | 2 | NC | NC |
| 487 | 898 | AAGGCTAGGGTTTTATCCTC | 2 | 3 | NC | NC |
| 488 | 900 | TGAAGGCTAGGGTTTTATCC | 1 | 2 | NC | NC |
| 489 | 901 | TTGAAGGCTAGGGTTTTATC | 1 | 1 | NC | NC |
| 490 | 902 | TTTGAAGGCTAGGGTTTTAT | 2 | 1 | NC | NC |
| 491 | 903 | TTTTGAAGGCTAGGGTTTTA | 2 | 3 | NC | NC |
| 492 | 904 | ATTTTGAAGGCTAGGGTTTT | 1 | 2 | NC | NC |
| 493 | 905 | CATTTTGAAGGCTAGGGTTT | 2 | 2 | NC | NC |
| 494 | 906 | TCATTTTGAAGGCTAGGGTT | 2 | 2 | NC | NC |
| 495 | 907 | TTCATTTTGAAGGCTAGGGT | 1 | 2 | NC | NC |
| 496 | 908 | ATTCATTTTGAAGGCTAGGG | 1 | 2 | NC | NC |
| 497 | 909 | CATTCATTTTGAAGGCTAGG | 2 | 3 | NC | NC |
| 498 | 910 | CCATTCATTTTGAAGGCTAG | 2 | 2 | NC | NC |
| 499 | 911 | ACCATTCATTTTGAAGGCTA | 2 | 2 | NC | NC |
| 500 | 912 | AACCATTCATTTTGAAGGCT | 2 | 2 | NC | NC |
| 501 | 913 | TAACCATTCATTTTGAAGGC | 2 | 1 | NC | NC |
| 502 | 914 | GTAACCATTCATTTTGAAGG | 1 | NC | NC | NC |
| 503 | 915 | TGTAACCATTCATTTTGAAG | 1 | NC | NC | NC |
| 504 | 917 | TATGTAACCATTCATTTTGA | 2 | NC | NC | NC |
| 505 | 918 | ATATGTAACCATTCATTTTG | 1 | NC | NC | NC |
| 506 | 919 | GATATGTAACCATTCATTTT | 2 | NC | NC | NC |
| 507 | 920 | GGATATGTAACCATTCATTT | 2 | NC | NC | NC |
| 508 | 921 | TGGATATGTAACCATTCATT | 2 | NC | NC | NC |
| 509 | 922 | TTGGATATGTAACCATTCAT | 2 | NC | NC | NC |
| 510 | 923 | ATTGGATATGTAACCATTCA | 2 | NC | NC | NC |
| 511 | 924 | CATTGGATATGTAACCATTC | 2 | NC | NC | NC |
| 512 | 925 | GCATTGGATATGTAACCATT | 2 | NC | NC | NC |
| 513 | 926 | TGCATTGGATATGTAACCAT | 2 | NC | NC | NC |
| 514 | 927 | TTGCATTGGATATGTAACCA | 2 | NC | NC | NC |
| 515 | 928 | TTTGCATTGGATATGTAACC | 2 | NC | NC | NC |
| 516 | 929 | GTTTGCATTGGATATGTAAC | 3 | NC | NC | NC |
| 517 | 930 | AGTTTGCATTGGATATGTAA | 2 | NC | NC | NC |
| 518 | 931 | TAGTTTGCATTGGATATGTA | 2 | NC | NC | NC |
| 519 | 932 | GTAGTTTGCATTGGATATGT | 3 | NC | NC | NC |
| 520 | 933 | AGTAGTTTGCATTGGATATG | 3 | NC | NC | NC |
| 521 | 934 | GAGTAGTTTGCATTGGATAT | 2 | NC | NC | NC |
| 522 | 935 | TGAGTAGTTTGCATTGGATA | 3 | 2 | NC | NC |
| 523 | 936 | CTGAGTAGTTTGCATTGGAT | 2 | 2 | NC | NC |
| 524 | 937 | ACTGAGTAGTTTGCATTGGA | 3 | 2 | NC | NC |
| 525 | 938 | CACTGAGTAGTTTGCATTGG | 3 | 2 | NC | NC |
| 526 | 939 | TCACTGAGTAGTTTGCATTG | 2 | 2 | NC | NC |
| 527 | 940 | TTCACTGAGTAGTTTGCATT | 1 | NC | NC | NC |
| 528 | 941 | CTTCACTGAGTAGTTTGCAT | 2 | 2 | NC | NC |
| 529 | 942 | TCTTCACTGAGTAGTTTGCA | 2 | 2 | NC | NC |
| 530 | 943 | TTCTTCACTGAGTAGTTTGC | 2 | 2 | NC | NC |
| 531 | 944 | CTTCTTCACTGAGTAGTTTG | 2 | NC | NC | NC |
| 532 | 945 | ACTTCTTCACTGAGTAGTTT | 2 | NC | NC | NC |
| 533 | 946 | CACTTCTTCACTGAGTAGTT | 2 | NC | NC | NC |
| 534 | 948 | TGCACTTCTTCACTGAGTAG | 2 | NC | NC | NC |
| 535 | 949 | ATGCACTTCTTCACTGAGTA | 2 | NC | NC | NC |
| 536 | 950 | GATGCACTTCTTCACTGAGT | 2 | NC | NC | NC |
| 537 | 951 | AGATGCACTTCTTCACTGAG | 2 | NC | NC | NC |
| 538 | 952 | AAGATGCACTTCTTCACTGA | 2 | NC | NC | NC |
| 539 | 962 | GAAGAGTAAGAAGATGCACT | 2 | NC | NC | NC |
| 540 | 963 | TGAAGAGTAAGAAGATGCAC | 2 | NC | NC | NC |
| 541 | 964 | ATGAAGAGTAAGAAGATGCA | 2 | NC | NC | NC |
| 542 | 965 | GATGAAGAGTAAGAAGATGC | 2 | 2 | NC | NC |
| 543 | 966 | TGATGAAGAGTAAGAAGATG | 1 | 1 | NC | NC |
| 544 | 967 | TTGATGAAGAGTAAGAAGAT | 2 | NC | NC | NC |
| 545 | 968 | GTTGATGAAGAGTAAGAAGA | 2 | 2 | NC | NC |
| 546 | 969 | GGTTGATGAAGAGTAAGAAG | 2 | 2 | NC | NC |
| 547 | 970 | TGGTTGATGAAGAGTAAGAA | 2 | 2 | NC | NC |
| 548 | 971 | ATGGTTGATGAAGAGTAAGA | 2 | 2 | NC | NC |
| 549 | 972 | GATGGTTGATGAAGAGTAAG | 2 | 3 | NC | NC |
| 550 | 973 | CGATGGTTGATGAAGAGTAA | 2 | NC | NC | NC |
| 551 | 974 | ACGATGGTTGATGAAGAGTA | 2 | 2 | NC | NC |
| 552 | 975 | GACGATGGTTGATGAAGAGT | 3 | 1 | NC | NC |
| 553 | 976 | AGACGATGGTTGATGAAGAG | 2 | 1 | NC | NC |
| 554 | 977 | CAGACGATGGTTGATGAAGA | 2 | 2 | NC | NC |
| 555 | 988 | GTTGATTCTACCAGACGATG | 3 | 2 | NC | NC |
| 556 | 989 | AGTTGATTCTACCAGACGAT | 3 | 3 | NC | NC |
| 557 | 990 | AAGTTGATTCTACCAGACGA | 3 | 2 | NC | NC |
| 558 | 991 | GAAGTTGATTCTACCAGACG | 3 | 2 | NC | NC |
| 559 | 992 | GGAAGTTGATTCTACCAGAC | 2 | 3 | NC | NC |
| 560 | 993 | AGGAAGTTGATTCTACCAGA | 2 | 2 | NC | NC |
| 561 | 994 | AAGGAAGTTGATTCTACCAG | 2 | NC | NC | NC |
| 562 | 995 | CAAGGAAGTTGATTCTACCA | 2 | NC | NC | NC |
| 563 | 1004 | GGCTTTTCTCAAGGAAGTTG | 2 | 1 | NC | NC |
| 564 | 1005 | TGGCTTTTCTCAAGGAAGTT | 2 | 1 | NC | NC |
| 565 | 1006 | ATGGCTTTTCTCAAGGAAGT | 2 | 2 | NC | NC |
| 566 | 1007 | TATGGCTTTTCTCAAGGAAG | 2 | 2 | NC | NC |
| 567 | 1008 | CTATGGCTTTTCTCAAGGAA | 1 | 2 | NC | NC |
| 568 | 1009 | TCTATGGCTTTTCTCAAGGA | 1 | 3 | NC | NC |
| 569 | 1010 | TTCTATGGCTTTTCTCAAGG | 1 | 2 | NC | NC |
| 570 | 1011 | TTTCTATGGCTTTTCTCAAG | 1 | 2 | NC | NC |
| 571 | 1012 | GTTTCTATGGCTTTTCTCAA | 2 | 2 | NC | NC |
| 572 | 1013 | TGTTTCTATGGCTTTTCTCA | 1 | 1 | NC | NC |
| 573 | 1014 | CTGTTTCTATGGCTTTTCTC | 1 | 2 | NC | NC |
| 574 | 1015 | ACTGTTTCTATGGCTTTTCT | 2 | 1 | NC | NC |
| 575 | 1016 | CACTGTTTCTATGGCTTTTC | 2 | 3 | NC | NC |
| 576 | 1017 | ACACTGTTTCTATGGCTTTT | 2 | 2 | NC | NC |
| 577 | 1018 | TACACTGTTTCTATGGCTTT | 2 | 2 | NC | NC |
| 578 | 1019 | ATACACTGTTTCTATGGCTT | 1 | 2 | NC | NC |
| 579 | 1020 | CATACACTGTTTCTATGGCT | 2 | 2 | NC | NC |
| 580 | 1021 | GCATACACTGTTTCTATGGC | 1 | NC | NC | NC |
| 581 | 1022 | TGCATACACTGTTTCTATGG | 1 | 1 | NC | NC |
| 582 | 1023 | CTGCATACACTGTTTCTATG | 2 | NC | NC | NC |
| 583 | 1024 | GCTGCATACACTGTTTCTAT | 2 | 1 | NC | NC |
| 584 | 1025 | GGCTGCATACACTGTTTCTA | 1 | 2 | NC | NC |
| 585 | 1026 | AGGCTGCATACACTGTTTCT | 2 | 2 | NC | NC |
| 586 | 1027 | TAGGCTGCATACACTGTTTC | 2 | 2 | NC | NC |
| 587 | 1028 | ATAGGCTGCATACACTGTTT | 2 | NC | NC | NC |
| 588 | 1029 | AATAGGCTGCATACACTGTT | 2 | NC | NC | NC |
| 589 | 1030 | AAATAGGCTGCATACACTGT | 2 | NC | NC | NC |
| 590 | 1031 | CAAATAGGCTGCATACACTG | 2 | NC | NC | NC |
| 591 | 1043 | TGTGTTTTTGGGCAAATAGG | 2 | NC | NC | NC |
| 592 | 1044 | GTGTGTTTTTGGGCAAATAG | 2 | NC | NC | NC |
| 593 | 1045 | TGTGTGTTTTTGGGCAAATA | 1 | NC | NC | NC |
| 594 | 1046 | GTGTGTGTTTTTGGGCAAAT | 1 | NC | NC | NC |
| 595 | 1047 | GGTGTGTGTTTTTGGGCAAA | 2 | NC | NC | NC |
| 596 | 1048 | GGGTGTGTGTTTTTGGGCAA | 2 | 2 | 2 | NC |
| 597 | 1049 | TGGGTGTGTGTTTTTGGGCA | 2 | 3 | 2 | NC |
| 598 | 1050 | ATGGGTGTGTGTTTTTGGGC | 2 | 2 | 2 | NC |
| 599 | 1051 | AATGGGTGTGTGTTTTTGGG | 1 | 2 | 2 | NC |
| 600 | 1052 | GAATGGGTGTGTGTTTTTGG | 1 | 2 | 2 | NC |
| 601 | 1053 | GGAATGGGTGTGTGTTTTTG | 1 | 2 | 2 | NC |
| 602 | 1054 | AGGAATGGGTGTGTGTTTTT | 2 | 2 | 2 | NC |
| 603 | 1055 | CAGGAATGGGTGTGTGTTTT | 2 | 2 | 2 | NC |
| 604 | 1056 | ACAGGAATGGGTGTGTGTTT | 2 | 2 | 1 | NC |
| 605 | 1057 | TACAGGAATGGGTGTGTGTT | 2 | 2 | 1 | NC |
| 606 | 1058 | GTACAGGAATGGGTGTGTGT | 1 | 2 | 1 | NC |
| 607 | 1059 | GGTACAGGAATGGGTGTGTG | 2 | 2 | 1 | NC |
| 608 | 1060 | AGGTACAGGAATGGGTGTGT | 2 | 2 | 2 | NC |
| 609 | 1061 | GAGGTACAGGAATGGGTGTG | 1 | 1 | 1 | NC |
| 610 | 1062 | TGAGGTACAGGAATGGGTGT | 2 | 1 | 2 | NC |
| 611 | 1073 | GATTTCTAAACTGAGGTACA | 1 | 2 | NC | NC |
| 612 | 1074 | TGATTTCTAAACTGAGGTAC | 2 | 1 | NC | NC |
| 613 | 1075 | CTGATTTCTAAACTGAGGTA | 2 | 2 | NC | NC |
| 614 | 1076 | ACTGATTTCTAAACTGAGGT | 1 | 1 | NC | NC |
| 615 | 1077 | GACTGATTTCTAAACTGAGG | 2 | 1 | NC | NC |
| 616 | 1078 | GGACTGATTTCTAAACTGAG | 2 | 2 | NC | NC |
| 617 | 1079 | GGGACTGATTTCTAAACTGA | 2 | 2 | NC | NC |
| 618 | 1099 | ACATTAACATCCACATTCTG | 2 | NC | NC | NC |
| 619 | 1100 | CACATTAACATCCACATTCT | 2 | 2 | NC | NC |
| 620 | 1101 | GCACATTAACATCCACATTC | 2 | 2 | NC | NC |
| 621 | 1102 | TGCACATTAACATCCACATT | 2 | 2 | NC | NC |
| 622 | 1103 | GTGCACATTAACATCCACAT | 2 | 2 | NC | NC |
| 623 | 1104 | GGTGCACATTAACATCCACA | 1 | 2 | NC | NC |
| 624 | 1105 | GGGTGCACATTAACATCCAC | 1 | 2 | NC | NC |
| 625 | 1123 | TGAACTTCATGCTTTGTGGG | 1 | 2 | NC | NC |
| 626 | 1124 | GTGAACTTCATGCTTTGTGG | 2 | 2 | NC | NC |
| 627 | 1125 | AGTGAACTTCATGCTTTGTG | 2 | 2 | NC | NC |
| 628 | 1126 | AAGTGAACTTCATGCTTTGT | 2 | 3 | NC | NC |
| 629 | 1177 | TTGCTCTCGATGTGCTGCTG | 1 | NC | NC | NC |
| 630 | 1178 | CTTGCTCTCGATGTGCTGCT | 1 | NC | NC | NC |
| 631 | 1180 | AGCTTGCTCTCGATGTGCTG | 2 | 2 | NC | NC |
| 632 | 1181 | GAGCTTGCTCTCGATGTGCT | 2 | 1 | NC | NC |
| 633 | 1183 | AGGAGCTTGCTCTCGATGTG | 2 | 2 | NC | NC |
| 634 | 1184 | CAGGAGCTTGCTCTCGATGT | 2 | 2 | NC | NC |
| 635 | 1214 | GGTGAAGTACATCCTGGAGG | 2 | 2 | NC | NC |
| 636 | 1221 | AAGTCTGGGTGAAGTACATC | 2 | 2 | NC | NC |
| 637 | 1222 | AAAGTCTGGGTGAAGTACAT | 2 | 2 | NC | NC |
| 638 | 1223 | CAAAGTCTGGGTGAAGTACA | 1 | 1 | NC | NC |
| 639 | 1224 | GCAAAGTCTGGGTGAAGTAC | 2 | 2 | NC | NC |
| 640 | 1225 | AGCAAAGTCTGGGTGAAGTA | 2 | 2 | NC | NC |
| 641 | 1226 | TAGCAAAGTCTGGGTGAAGT | 2 | 2 | NC | NC |
| 642 | 1227 | GTAGCAAAGTCTGGGTGAAG | 2 | 2 | NC | NC |
| 643 | 1228 | GGTAGCAAAGTCTGGGTGAA | 3 | 1 | NC | NC |
| 644 | 1229 | TGGTAGCAAAGTCTGGGTGA | 2 | 2 | NC | NC |
| 645 | 1230 | CTGGTAGCAAAGTCTGGGTG | 2 | 2 | NC | NC |
| 646 | 1231 | CCTGGTAGCAAAGTCTGGGT | 2 | 2 | NC | NC |
| 647 | 1232 | TCCTGGTAGCAAAGTCTGGG | 2 | NC | NC | NC |
| 648 | 1233 | GTCCTGGTAGCAAAGTCTGG | 2 | 1 | NC | NC |
| 649 | 1234 | AGTCCTGGTAGCAAAGTCTG | 2 | 2 | NC | NC |
| 650 | 1235 | AAGTCCTGGTAGCAAAGTCT | 2 | 1 | NC | NC |
| 651 | 1236 | CAAGTCCTGGTAGCAAAGTC | 2 | 2 | NC | NC |
| 652 | 1237 | GCAAGTCCTGGTAGCAAAGT | 2 | 2 | NC | NC |
| 653 | 1238 | AGCAAGTCCTGGTAGCAAAG | 1 | 2 | NC | NC |
| 654 | 1239 | CAGCAAGTCCTGGTAGCAAA | 1 | 2 | NC | NC |
| 655 | 1264 | GATTTAACCATCTCCCCAGA | 2 | 2 | NC | NC |
| 656 | 1265 | GGATTTAACCATCTCCCCAG | 2 | 2 | NC | NC |
| 657 | 1266 | TGGATTTAACCATCTCCCCA | 2 | 2 | NC | NC |
| 658 | 1275 | GACTTGTTGTGGATTTAACC | 2 | NC | NC | NC |
| 659 | 1276 | AGACTTGTTGTGGATTTAAC | 2 | NC | NC | NC |
| 660 | 1277 | CAGACTTGTTGTGGATTTAA | 2 | NC | NC | NC |
| 661 | 1278 | TCAGACTTGTTGTGGATTTA | 2 | NC | NC | NC |
| 662 | 1279 | GTCAGACTTGTTGTGGATTT | 2 | NC | NC | NC |
| 663 | 1280 | GGTCAGACTTGTTGTGGATT | 2 | NC | NC | NC |
| 664 | 1281 | AGGTCAGACTTGTTGTGGAT | 3 | NC | NC | NC |
| 665 | 1282 | GAGGTCAGACTTGTTGTGGA | 3 | NC | NC | NC |
| 666 | 1283 | CGAGGTCAGACTTGTTGTGG | 2 | NC | NC | NC |
| 667 | 1284 | ACGAGGTCAGACTTGTTGTG | 3 | NC | NC | NC |
| 668 | 1285 | GACGAGGTCAGACTTGTTGT | 3 | NC | NC | NC |
| 669 | 1286 | AGACGAGGTCAGACTTGTTG | 2 | NC | NC | NC |
| 670 | 1287 | AAGACGAGGTCAGACTTGTT | 3 | NC | NC | NC |
| 671 | 1288 | GAAGACGAGGTCAGACTTGT | 3 | NC | NC | NC |
| 672 | 1289 | AGAAGACGAGGTCAGACTTG | 2 | NC | NC | NC |
| 673 | 1290 | TAGAAGACGAGGTCAGACTT | 2 | NC | NC | NC |
| 674 | 1291 | GTAGAAGACGAGGTCAGACT | 2 | NC | NC | NC |
| 675 | 1292 | AGTAGAAGACGAGGTCAGAC | 2 | NC | NC | NC |
| 676 | 1293 | AAGTAGAAGACGAGGTCAGA | 1 | NC | NC | NC |
| 677 | 1294 | GAAGTAGAAGACGAGGTCAG | 2 | NC | NC | NC |
| 678 | 1295 | AGAAGTAGAAGACGAGGTCA | 2 | NC | NC | NC |
| 679 | 1296 | CAGAAGTAGAAGACGAGGTC | 2 | NC | NC | NC |
| 680 | 1297 | CCAGAAGTAGAAGACGAGGT | 2 | NC | NC | NC |
| 681 | 1298 | TCCAGAAGTAGAAGACGAGG | 2 | NC | NC | NC |
| 682 | 1299 | TTCCAGAAGTAGAAGACGAG | 2 | NC | NC | NC |
| 683 | 1311 | CCTTATCACTACTTCCAGAA | 2 | NC | NC | NC |
| 684 | 1312 | ACCTTATCACTACTTCCAGA | 2 | NC | NC | NC |
| 685 | 1313 | GACCTTATCACTACTTCCAG | 3 | NC | NC | NC |
| 686 | 1314 | AGACCTTATCACTACTTCCA | 2 | NC | NC | NC |
| 687 | 1315 | TAGACCTTATCACTACTTCC | 2 | NC | NC | NC |
| 688 | 1316 | ATAGACCTTATCACTACTTC | 2 | NC | NC | NC |
| 689 | 1317 | CATAGACCTTATCACTACTT | 2 | NC | NC | NC |
| 690 | 1318 | GCATAGACCTTATCACTACT | 3 | NC | NC | NC |
| 691 | 1319 | GGCATAGACCTTATCACTAC | 2 | NC | NC | NC |
| 692 | 1320 | GGGCATAGACCTTATCACTA | 2 | NC | NC | NC |
| 693 | 1321 | TGGGCATAGACCTTATCACT | 2 | NC | NC | NC |
| 694 | 1322 | GTGGGCATAGACCTTATCAC | 3 | NC | NC | NC |
| 695 | 1323 | GGTGGGCATAGACCTTATCA | 2 | NC | NC | NC |
| 696 | 1324 | TGGTGGGCATAGACCTTATC | 3 | NC | NC | NC |
| 697 | 1325 | CTGGTGGGCATAGACCTTAT | 3 | NC | NC | NC |
| 698 | 1326 | TCTGGTGGGCATAGACCTTA | 2 | NC | NC | NC |
| 699 | 1327 | ATCTGGTGGGCATAGACCTT | 2 | 2 | NC | NC |
| 700 | 1328 | CATCTGGTGGGCATAGACCT | 2 | 2 | NC | NC |
| 701 | 1342 | GAATCTGTACGAACCATCTG | 3 | 2 | NC | NC |
| 702 | 1343 | GGAATCTGTACGAACCATCT | 3 | 2 | NC | NC |
| 703 | 1344 | GGGAATCTGTACGAACCATC | 3 | 2 | NC | NC |
| 704 | 1345 | CGGGAATCTGTACGAACCAT | 2 | 2 | NC | NC |
| 705 | 1346 | CCGGGAATCTGTACGAACCA | 2 | 1 | NC | NC |
| 706 | 1348 | TCCCGGGAATCTGTACGAAC | 3 | 2 | NC | NC |
| 707 | 1360 | TCAAGCTTCTGTTCCCGGGA | 2 | 2 | NC | NC |
| 708 | 1361 | ATCAAGCTTCTGTTCCCGGG | 3 | 2 | NC | NC |
| 709 | 1362 | CATCAAGCTTCTGTTCCCGG | 3 | 2 | NC | NC |
| 710 | 1381 | CTCAGAGGCTGCAGAAATGC | 1 | 2 | NC | NC |
| 711 | 1382 | GCTCAGAGGCTGCAGAAATG | 1 | 2 | NC | NC |
| 712 | 1383 | TGCTCAGAGGCTGCAGAAAT | 1 | 2 | NC | NC |
| 713 | 1384 | TTGCTCAGAGGCTGCAGAAA | 1 | NC | NC | NC |
| 714 | 1385 | TTTGCTCAGAGGCTGCAGAA | 2 | 2 | NC | NC |
| 715 | 1386 | GTTTGCTCAGAGGCTGCAGA | 2 | 2 | NC | NC |
| 716 | 1423 | TCCTCTGTGACAATGGCCTG | 2 | NC | NC | NC |
| 717 | 1424 | ATCCTCTGTGACAATGGCCT | 2 | NC | NC | NC |
| 718 | 1425 | TATCCTCTGTGACAATGGCC | 2 | NC | NC | NC |
| 719 | 1426 | TTATCCTCTGTGACAATGGC | 2 | NC | NC | NC |
| 720 | 1427 | CTTATCCTCTGTGACAATGG | 2 | NC | NC | NC |
| 721 | 1428 | TCTTATCCTCTGTGACAATG | 2 | NC | NC | NC |
| 722 | 1429 | GTCTTATCCTCTGTGACAAT | 2 | NC | NC | NC |
| 723 | 1430 | TGTCTTATCCTCTGTGACAA | 2 | NC | NC | NC |
| 724 | 1431 | CTGTCTTATCCTCTGTGACA | 1 | NC | NC | NC |
| 725 | 1432 | TCTGTCTTATCCTCTGTGAC | 1 | NC | NC | NC |
| 726 | 1433 | ATCTGTCTTATCCTCTGTGA | 1 | NC | NC | NC |
| 727 | 1434 | TATCTGTCTTATCCTCTGTG | 1 | NC | NC | NC |
| 728 | 1435 | ATATCTGTCTTATCCTCTGT | 2 | NC | NC | NC |
| 729 | 1436 | AATATCTGTCTTATCCTCTG | 2 | 2 | NC | NC |
| 730 | 1437 | AAATATCTGTCTTATCCTCT | 2 | 2 | NC | NC |
| 731 | 1438 | GAAATATCTGTCTTATCCTC | 2 | 1 | NC | NC |
| 732 | 1439 | AGAAATATCTGTCTTATCCT | 2 | NC | NC | NC |
| 733 | 1440 | TAGAAATATCTGTCTTATCC | 2 | 2 | NC | NC |
| 734 | 1441 | CTAGAAATATCTGTCTTATC | 2 | 2 | NC | NC |
| 735 | 1442 | ACTAGAAATATCTGTCTTAT | 2 | 1 | NC | NC |
| 736 | 1443 | CACTAGAAATATCTGTCTTA | 2 | 2 | NC | NC |
| 737 | 1444 | CCACTAGAAATATCTGTCTT | 2 | 3 | NC | NC |
| 738 | 1445 | GCCACTAGAAATATCTGTCT | 2 | 2 | NC | NC |
| 739 | 1446 | TGCCACTAGAAATATCTGTC | 2 | 2 | NC | NC |
| 740 | 1447 | CTGCCACTAGAAATATCTGT | 2 | 2 | NC | NC |
| 741 | 1448 | CCTGCCACTAGAAATATCTG | 2 | 2 | NC | NC |
| 742 | 1450 | GCCCTGCCACTAGAAATATC | 2 | 2 | NC | NC |
| 743 | 1451 | AGCCCTGCCACTAGAAATAT | 2 | NC | NC | NC |
| 744 | 1452 | TAGCCCTGCCACTAGAAATA | 2 | 2 | NC | NC |
| 745 | 1453 | CTAGCCCTGCCACTAGAAAT | 2 | 2 | NC | NC |
| 746 | 1454 | CCTAGCCCTGCCACTAGAAA | 2 | 1 | NC | NC |
| 747 | 1469 | CTCCTCATCTTGCTGCCTAG | 2 | 2 | NC | NC |
| 748 | 1470 | TCTCCTCATCTTGCTGCCTA | 1 | 2 | NC | NC |
| 749 | 1471 | ATCTCCTCATCTTGCTGCCT | 2 | 2 | NC | NC |
| 750 | 1472 | CATCTCCTCATCTTGCTGCC | 2 | NC | NC | NC |
| 751 | 1473 | GCATCTCCTCATCTTGCTGC | 2 | 1 | NC | NC |
| 752 | 1476 | CAAGCATCTCCTCATCTTGC | 2 | 2 | NC | NC |
| 753 | 1477 | TCAAGCATCTCCTCATCTTG | 2 | 2 | NC | NC |
| 754 | 1478 | TTCAAGCATCTCCTCATCTT | 2 | 2 | NC | NC |
| 755 | 1479 | GTTCAAGCATCTCCTCATCT | 1 | 2 | NC | NC |
| 756 | 1480 | AGTTCAAGCATCTCCTCATC | 1 | 2 | NC | NC |
| 757 | 1481 | GAGTTCAAGCATCTCCTCAT | 2 | 2 | NC | NC |
| 758 | 1486 | GCTGGGAGTTCAAGCATCTC | 2 | NC | NC | NC |
| 759 | 1487 | GGCTGGGAGTTCAAGCATCT | 1 | NC | NC | NC |
| 760 | 1508 | TTTGGCAGCCACTTCAGCAG | 1 | 1 | NC | NC |
| 761 | 1509 | TTTTGGCAGCCACTTCAGCA | 1 | 2 | NC | NC |
| 762 | 1510 | TTTTTGGCAGCCACTTCAGC | 2 | 1 | NC | NC |
| 763 | 1511 | ATTTTTGGCAGCCACTTCAG | 2 | 2 | NC | NC |
| 764 | 1512 | GATTTTTGGCAGCCACTTCA | 2 | NC | NC | NC |
| 765 | 1513 | TGATTTTTGGCAGCCACTTC | 2 | 2 | NC | NC |
| 766 | 1514 | CTGATTTTTGGCAGCCACTT | 2 | 2 | NC | NC |
| 767 | 1515 | TCTGATTTTTGGCAGCCACT | 1 | 2 | NC | NC |
| 768 | 1516 | CTCTGATTTTTGGCAGCCAC | 2 | 2 | NC | NC |
| 769 | 1517 | GCTCTGATTTTTGGCAGCCA | 2 | 2 | NC | NC |
| 770 | 1518 | AGCTCTGATTTTTGGCAGCC | 2 | NC | NC | NC |
| 771 | 1519 | AAGCTCTGATTTTTGGCAGC | 2 | NC | NC | NC |
| 772 | 1520 | CAAGCTCTGATTTTTGGCAG | 2 | NC | NC | NC |
| 773 | 1521 | CCAAGCTCTGATTTTTGGCA | 2 | NC | NC | NC |
| 774 | 1524 | CCTCCAAGCTCTGATTTTTG | 2 | NC | NC | NC |
| 775 | 1525 | CCCTCCAAGCTCTGATTTTT | 1 | NC | NC | NC |
| 776 | 1526 | CCCCTCCAAGCTCTGATTTT | 1 | NC | NC | NC |
| 777 | 1527 | CCCCCTCCAAGCTCTGATTT | 2 | NC | NC | NC |
| 778 | 1528 | TCCCCCTCCAAGCTCTGATT | 2 | NC | NC | NC |
| 779 | 1529 | ATCCCCCTCCAAGCTCTGAT | 2 | NC | NC | NC |
| 780 | 1530 | TATCCCCCTCCAAGCTCTGA | 2 | NC | NC | NC |
| 781 | 1532 | TGTATCCCCCTCCAAGCTCT | 2 | NC | NC | NC |
| 782 | 1533 | TTGTATCCCCCTCCAAGCTC | 2 | NC | NC | NC |
| 783 | 1534 | GTTGTATCCCCCTCCAAGCT | 2 | NC | NC | NC |
| 784 | 1535 | TGTTGTATCCCCCTCCAAGC | 2 | NC | NC | NC |
| 785 | 1536 | TTGTTGTATCCCCCTCCAAG | 2 | NC | NC | NC |
| 786 | 1537 | TTTGTTGTATCCCCCTCCAA | 2 | NC | NC | NC |
| 787 | 1538 | CTTTGTTGTATCCCCCTCCA | 2 | NC | NC | NC |
| 788 | 1539 | CCTTTGTTGTATCCCCCTCC | 2 | 2 | NC | NC |
| 789 | 1540 | CCCTTTGTTGTATCCCCCTC | 2 | NC | NC | NC |
| 790 | 1541 | CCCCTTTGTTGTATCCCCCT | 2 | 2 | NC | NC |
| 791 | 1542 | TCCCCTTTGTTGTATCCCCC | 2 | 2 | NC | NC |
| 792 | 1543 | GTCCCCTTTGTTGTATCCCC | 2 | 1 | NC | NC |
| 793 | 1544 | AGTCCCCTTTGTTGTATCCC | 2 | NC | NC | NC |
| 794 | 1545 | AAGTCCCCTTTGTTGTATCC | 2 | NC | NC | NC |
| 795 | 1546 | GAAGTCCCCTTTGTTGTATC | 2 | NC | NC | NC |
| 796 | 1547 | TGAAGTCCCCTTTGTTGTAT | 2 | NC | NC | NC |
| 797 | 1548 | CTGAAGTCCCCTTTGTTGTA | 2 | NC | NC | NC |
| 798 | 1549 | TCTGAAGTCCCCTTTGTTGT | 2 | NC | NC | NC |
| 799 | 1550 | TTCTGAAGTCCCCTTTGTTG | 1 | NC | NC | NC |
| 800 | 1551 | TTTCTGAAGTCCCCTTTGTT | 1 | NC | NC | NC |
| 801 | 1552 | ATTTCTGAAGTCCCCTTTGT | 1 | NC | NC | NC |
| 802 | 1553 | CATTTCTGAAGTCCCCTTTG | 1 | NC | NC | NC |
| 803 | 1554 | ACATTTCTGAAGTCCCCTTT | 1 | NC | NC | NC |
| 804 | 1555 | GACATTTCTGAAGTCCCCTT | 1 | NC | NC | NC |
| 805 | 1556 | TGACATTTCTGAAGTCCCCT | 1 | NC | NC | NC |
| 806 | 1557 | CTGACATTTCTGAAGTCCCC | 2 | NC | NC | NC |
| 807 | 1558 | TCTGACATTTCTGAAGTCCC | 2 | NC | NC | NC |
| 808 | 1559 | CTCTGACATTTCTGAAGTCC | 2 | NC | NC | NC |
| 809 | 1560 | TCTCTGACATTTCTGAAGTC | 2 | NC | NC | NC |
| 810 | 1561 | TTCTCTGACATTTCTGAAGT | 2 | NC | NC | NC |
| 811 | 1562 | CTTCTCTGACATTTCTGAAG | 2 | NC | NC | NC |
| 812 | 1563 | TCTTCTCTGACATTTCTGAA | 2 | NC | NC | NC |
| 813 | 1564 | CTCTTCTCTGACATTTCTGA | 2 | 2 | NC | NC |
| 814 | 1565 | TCTCTTCTCTGACATTTCTG | 1 | 2 | NC | NC |
| 815 | 1566 | CTCTCTTCTCTGACATTTCT | 1 | 2 | NC | NC |
| 816 | 1567 | CCTCTCTTCTCTGACATTTC | 2 | NC | NC | NC |
| 817 | 1568 | TCCTCTCTTCTCTGACATTT | 2 | 2 | NC | NC |
| 818 | 1569 | GTCCTCTCTTCTCTGACATT | 1 | 3 | NC | NC |
| 819 | 1570 | GGTCCTCTCTTCTCTGACAT | 2 | 2 | NC | NC |
| 820 | 1571 | AGGTCCTCTCTTCTCTGACA | 2 | NC | NC | NC |
| 821 | 1572 | TAGGTCCTCTCTTCTCTGAC | 2 | NC | NC | NC |
| 822 | 1573 | GTAGGTCCTCTCTTCTCTGA | 2 | NC | NC | NC |
| 823 | 1574 | AGTAGGTCCTCTCTTCTCTG | 2 | NC | NC | NC |
| 824 | 1575 | AAGTAGGTCCTCTCTTCTCT | 2 | NC | NC | NC |
| 825 | 1576 | GAAGTAGGTCCTCTCTTCTC | 2 | NC | NC | NC |
| 826 | 1577 | GGAAGTAGGTCCTCTCTTCT | 2 | NC | NC | NC |
| 827 | 1603 | TCCCGATGTCTCTTTCTGGG | 2 | 2 | NC | NC |
| 828 | 1604 | TTCCCGATGTCTCTTTCTGG | 2 | 3 | NC | NC |
| 829 | 1605 | CTTCCCGATGTCTCTTTCTG | 2 | 2 | NC | NC |
| 830 | 1606 | TCTTCCCGATGTCTCTTTCT | 2 | 2 | NC | NC |
| 831 | 1607 | ATCTTCCCGATGTCTCTTTC | 2 | 2 | NC | NC |
| 832 | 1608 | AATCTTCCCGATGTCTCTTT | 2 | 1 | NC | NC |
| 833 | 1609 | GAATCTTCCCGATGTCTCTT | 2 | 2 | NC | NC |
| 834 | 1610 | AGAATCTTCCCGATGTCTCT | 2 | 2 | NC | NC |
| 835 | 1611 | CAGAATCTTCCCGATGTCTC | 3 | 2 | NC | NC |
| 836 | 1612 | TCAGAATCTTCCCGATGTCT | 2 | NC | NC | NC |
| 837 | 1613 | ATCAGAATCTTCCCGATGTC | 2 | NC | NC | NC |
| 838 | 1614 | CATCAGAATCTTCCCGATGT | 2 | NC | NC | NC |
| 839 | 1616 | CACATCAGAATCTTCCCGAT | 2 | NC | NC | NC |
| 840 | 1617 | CCACATCAGAATCTTCCCGA | 2 | 2 | NC | NC |
| 841 | 1618 | TCCACATCAGAATCTTCCCG | 2 | 2 | NC | NC |
| 842 | 1619 | TTCCACATCAGAATCTTCCC | 2 | 2 | NC | NC |
| 843 | 1620 | TTTCCACATCAGAATCTTCC | 1 | 3 | NC | NC |
| 844 | 1621 | ATTTCCACATCAGAATCTTC | 1 | 2 | NC | NC |
| 845 | 1622 | CATTTCCACATCAGAATCTT | 2 | 3 | NC | NC |
| 846 | 1623 | CCATTTCCACATCAGAATCT | 2 | NC | NC | NC |
| 847 | 1624 | ACCATTTCCACATCAGAATC | 2 | 2 | NC | NC |
| 848 | 1625 | CACCATTTCCACATCAGAAT | 2 | 2 | NC | NC |
| 849 | 1626 | CCACCATTTCCACATCAGAA | 2 | 2 | NC | NC |
| 850 | 1627 | TCCACCATTTCCACATCAGA | 2 | 2 | 2 | NC |
| 851 | 1628 | TTCCACCATTTCCACATCAG | 1 | 1 | 2 | NC |
| 852 | 1629 | CTTCCACCATTTCCACATCA | 2 | 3 | NC | NC |
| 853 | 1630 | TCTTCCACCATTTCCACATC | 2 | 2 | NC | NC |
| 854 | 1631 | ATCTTCCACCATTTCCACAT | 1 | 2 | NC | NC |
| 855 | 1632 | CATCTTCCACCATTTCCACA | 1 | 2 | NC | NC |
| 856 | 1633 | TCATCTTCCACCATTTCCAC | 1 | 2 | NC | NC |
| 857 | 1634 | ATCATCTTCCACCATTTCCA | 2 | 3 | NC | NC |
| 858 | 1635 | AATCATCTTCCACCATTTCC | 1 | 2 | NC | NC |
| 859 | 1636 | GAATCATCTTCCACCATTTC | 2 | 2 | NC | NC |
| 860 | 1644 | CCTTTCGGGAATCATCTTCC | 2 | 2 | NC | NC |
| 861 | 1655 | TGCAGTCATTTCCTTTCGGG | 2 | 2 | NC | NC |
| 862 | 1656 | CTGCAGTCATTTCCTTTCGG | 2 | 1 | NC | NC |
| 863 | 1657 | GCTGCAGTCATTTCCTTTCG | 2 | NC | NC | NC |
| 864 | 1658 | AGCTGCAGTCATTTCCTTTC | 1 | 1 | NC | NC |
| 865 | 1659 | AAGCTGCAGTCATTTCCTTT | 1 | 2 | NC | NC |
| 866 | 1660 | CAAGCTGCAGTCATTTCCTT | 2 | 2 | NC | NC |
| 867 | 1661 | ACAAGCTGCAGTCATTTCCT | 2 | 1 | NC | NC |
| 868 | 1662 | TACAAGCTGCAGTCATTTCC | 2 | 2 | NC | NC |
| 869 | 1663 | GTACAAGCTGCAGTCATTTC | 2 | 2 | NC | NC |
| 870 | 1664 | GGTACAAGCTGCAGTCATTT | 2 | 2 | NC | NC |
| 871 | 1665 | GGGTACAAGCTGCAGTCATT | 2 | 2 | NC | NC |
| 872 | 1685 | GTTAATGATCCTTCTCCGGG | 3 | 2 | NC | NC |
| 873 | 1686 | GGTTAATGATCCTTCTCCGG | 3 | 2 | NC | NC |
| 874 | 1687 | AGGTTAATGATCCTTCTCCG | 2 | 2 | NC | NC |
| 875 | 1688 | GAGGTTAATGATCCTTCTCC | 1 | 2 | NC | NC |
| 876 | 1689 | TGAGGTTAATGATCCTTCTC | 2 | 2 | NC | NC |
| 877 | 1690 | GTGAGGTTAATGATCCTTCT | 2 | 1 | NC | NC |
| 878 | 1691 | AGTGAGGTTAATGATCCTTC | 2 | 2 | NC | NC |
| 879 | 1692 | TAGTGAGGTTAATGATCCTT | 2 | 1 | NC | NC |
| 880 | 1693 | CTAGTGAGGTTAATGATCCT | 2 | 1 | NC | NC |
| 881 | 1694 | ACTAGTGAGGTTAATGATCC | 2 | 1 | NC | NC |
| 882 | 1695 | CACTAGTGAGGTTAATGATC | 2 | 2 | NC | NC |
| 883 | 1707 | GGAGACTCAAAACACTAGTG | 2 | 2 | NC | NC |
| 884 | 1708 | TGGAGACTCAAAACACTAGT | 2 | 2 | NC | NC |
| 885 | 1709 | CTGGAGACTCAAAACACTAG | 2 | 2 | NC | NC |
| 886 | 1710 | CCTGGAGACTCAAAACACTA | 2 | 1 | NC | NC |
| 887 | 1711 | TCCTGGAGACTCAAAACACT | 2 | 2 | NC | NC |
| 888 | 1712 | TTCCTGGAGACTCAAAACAC | 1 | 2 | NC | NC |
| 889 | 1713 | CTTCCTGGAGACTCAAAACA | 2 | 2 | NC | NC |
| 890 | 1714 | TCTTCCTGGAGACTCAAAAC | 2 | 2 | NC | NC |
| 891 | 1715 | TTCTTCCTGGAGACTCAAAA | 2 | 1 | NC | NC |
| 892 | 1716 | TTTCTTCCTGGAGACTCAAA | 1 | 2 | NC | NC |
| 893 | 1717 | ATTTCTTCCTGGAGACTCAA | 2 | 2 | NC | NC |
| 894 | 1718 | AATTTCTTCCTGGAGACTCA | 2 | 2 | NC | NC |
| 895 | 1719 | TAATTTCTTCCTGGAGACTC | 2 | NC | NC | NC |
| 896 | 1720 | TTAATTTCTTCCTGGAGACT | 1 | NC | NC | NC |
| 897 | 1721 | ATTAATTTCTTCCTGGAGAC | 1 | 2 | NC | NC |
| 898 | 1722 | CATTAATTTCTTCCTGGAGA | 1 | 1 | NC | NC |
| 899 | 1723 | TCATTAATTTCTTCCTGGAG | 1 | 3 | NC | NC |
| 900 | 1724 | CTCATTAATTTCTTCCTGGA | 1 | 2 | NC | NC |
| 901 | 1725 | GCTCATTAATTTCTTCCTGG | 2 | 2 | NC | NC |
| 902 | 1726 | TGCTCATTAATTTCTTCCTG | 1 | NC | NC | NC |
| 903 | 1727 | CTGCTCATTAATTTCTTCCT | 2 | NC | NC | NC |
| 904 | 1728 | CCTGCTCATTAATTTCTTCC | 2 | NC | NC | NC |
| 905 | 1729 | CCCTGCTCATTAATTTCTTC | 2 | NC | NC | NC |
| 906 | 1730 | TCCCTGCTCATTAATTTCTT | 2 | NC | NC | NC |
| 907 | 1731 | GTCCCTGCTCATTAATTTCT | 2 | NC | NC | NC |
| 908 | 1732 | TGTCCCTGCTCATTAATTTC | 2 | NC | NC | NC |
| 909 | 1733 | ATGTCCCTGCTCATTAATTT | 2 | NC | NC | NC |
| 910 | 1734 | CATGTCCCTGCTCATTAATT | 2 | NC | NC | NC |
| 911 | 1735 | TCATGTCCCTGCTCATTAAT | 2 | NC | NC | NC |
| 912 | 1736 | CTCATGTCCCTGCTCATTAA | 2 | NC | NC | NC |
| 913 | 1737 | CCTCATGTCCCTGCTCATTA | 2 | NC | NC | NC |
| 914 | 1738 | ACCTCATGTCCCTGCTCATT | 2 | NC | NC | NC |
| 915 | 1739 | AACCTCATGTCCCTGCTCAT | 2 | NC | NC | NC |
| 916 | 1740 | GAACCTCATGTCCCTGCTCA | 2 | NC | NC | NC |
| 917 | 1741 | AGAACCTCATGTCCCTGCTC | 2 | NC | NC | NC |
| 918 | 1742 | GAGAACCTCATGTCCCTGCT | 1 | NC | NC | NC |
| 919 | 1749 | TCTCCCGGAGAACCTCATGT | 3 | NC | NC | NC |
| 920 | 1759 | TTATGCAACATCTCCCGGAG | 2 | NC | NC | NC |
| 921 | 1760 | GTTATGCAACATCTCCCGGA | 3 | NC | NC | NC |
| 922 | 1761 | GGTTATGCAACATCTCCCGG | 3 | NC | NC | NC |
| 923 | 1762 | TGGTTATGCAACATCTCCCG | 2 | 1 | NC | NC |
| 924 | 1763 | GTGGTTATGCAACATCTCCC | 2 | 2 | NC | NC |
| 925 | 1764 | AGTGGTTATGCAACATCTCC | 2 | 2 | NC | NC |
| 926 | 1765 | GAGTGGTTATGCAACATCTC | 2 | 2 | NC | NC |
| 927 | 1766 | GGAGTGGTTATGCAACATCT | 2 | 1 | NC | NC |
| 928 | 1767 | AGGAGTGGTTATGCAACATC | 2 | 1 | NC | NC |
| 929 | 1768 | AAGGAGTGGTTATGCAACAT | 2 | 2 | NC | NC |
| 930 | 1769 | GAAGGAGTGGTTATGCAACA | 2 | 1 | NC | NC |
| 931 | 1770 | CGAAGGAGTGGTTATGCAAC | 2 | 1 | NC | NC |
| 932 | 1771 | ACGAAGGAGTGGTTATGCAA | 3 | NC | NC | NC |
| 933 | 1785 | GATTCACACAGCCCACGAAG | 2 | 2 | NC | NC |
| 934 | 1786 | GGATTCACACAGCCCACGAA | 2 | 2 | NC | NC |
| 935 | 1787 | AGGATTCACACAGCCCACGA | 2 | NC | NC | NC |
| 936 | 1789 | TGAGGATTCACACAGCCCAC | 2 | 2 | 2 | 2 |
| 937 | 1790 | CTGAGGATTCACACAGCCCA | 2 | 2 | 1 | 1 |
| 938 | 1791 | ACTGAGGATTCACACAGCCC | 2 | 2 | 2 | 2 |
| 939 | 1792 | CACTGAGGATTCACACAGCC | 2 | NC | 2 | 2 |
| 940 | 1814 | GGTTTGATGCTGTGCCAAGG | 3 | NC | NC | NC |
| 941 | 1815 | TGGTTTGATGCTGTGCCAAG | 2 | NC | NC | NC |
| 942 | 1816 | TTGGTTTGATGCTGTGCCAA | 2 | NC | NC | NC |
| 943 | 1817 | CTTGGTTTGATGCTGTGCCA | 1 | NC | NC | NC |
| 944 | 1818 | ACTTGGTTTGATGCTGTGCC | 2 | NC | NC | NC |
| 945 | 1819 | AACTTGGTTTGATGCTGTGC | 2 | NC | NC | NC |
| 946 | 1820 | TAACTTGGTTTGATGCTGTG | 2 | NC | NC | NC |
| 947 | 1821 | ATAACTTGGTTTGATGCTGT | 1 | NC | NC | NC |
| 948 | 1822 | TATAACTTGGTTTGATGCTG | 2 | NC | NC | NC |
| 949 | 1823 | GTATAACTTGGTTTGATGCT | 2 | NC | NC | NC |
| 950 | 1824 | GGTATAACTTGGTTTGATGC | 3 | NC | NC | NC |
| 951 | 1825 | AGGTATAACTTGGTTTGATG | 2 | NC | NC | NC |
| 952 | 1826 | AAGGTATAACTTGGTTTGAT | 2 | NC | NC | NC |
| 953 | 1827 | GAAGGTATAACTTGGTTTGA | 2 | NC | NC | NC |
| 954 | 1828 | AGAAGGTATAACTTGGTTTG | 2 | NC | NC | NC |
| 955 | 1829 | GAGAAGGTATAACTTGGTTT | 2 | NC | NC | NC |
| 956 | 1830 | TGAGAAGGTATAACTTGGTT | 2 | NC | NC | NC |
| 957 | 1831 | TTGAGAAGGTATAACTTGGT | 2 | NC | NC | NC |
| 958 | 1832 | GTTGAGAAGGTATAACTTGG | 2 | NC | NC | NC |
| 959 | 1833 | TGTTGAGAAGGTATAACTTG | 2 | NC | NC | NC |
| 960 | 1834 | GTGTTGAGAAGGTATAACTT | 2 | NC | NC | NC |
| 961 | 1835 | GGTGTTGAGAAGGTATAACT | 2 | NC | NC | NC |
| 962 | 1836 | TGGTGTTGAGAAGGTATAAC | 2 | NC | NC | NC |
| 963 | 1837 | GTGGTGTTGAGAAGGTATAA | 2 | NC | NC | NC |
| 964 | 1838 | GGTGGTGTTGAGAAGGTATA | 2 | NC | NC | NC |
| 965 | 1839 | TGGTGGTGTTGAGAAGGTAT | 2 | NC | NC | NC |
| 966 | 1840 | TTGGTGGTGTTGAGAAGGTA | 2 | NC | NC | NC |
| 967 | 1841 | CTTGGTGGTGTTGAGAAGGT | 2 | NC | NC | NC |
| 968 | 1842 | GCTTGGTGGTGTTGAGAAGG | 2 | NC | NC | NC |
| 969 | 1843 | AGCTTGGTGGTGTTGAGAAG | 2 | NC | NC | NC |
| 970 | 1844 | AAGCTTGGTGGTGTTGAGAA | 2 | NC | NC | NC |
| 971 | 1845 | TAAGCTTGGTGGTGTTGAGA | 2 | NC | NC | NC |
| 972 | 1846 | CTAAGCTTGGTGGTGTTGAG | 3 | NC | NC | NC |
| 973 | 1847 | ACTAAGCTTGGTGGTGTTGA | 2 | NC | NC | NC |
| 974 | 1848 | CACTAAGCTTGGTGGTGTTG | 2 | NC | NC | NC |
| 975 | 1855 | AGTTCTTCACTAAGCTTGGT | 2 | 2 | NC | NC |
| 976 | 1856 | CAGTTCTTCACTAAGCTTGG | 1 | 2 | NC | NC |
| 977 | 1857 | ACAGTTCTTCACTAAGCTTG | 2 | 2 | NC | NC |
| 978 | 1858 | AACAGTTCTTCACTAAGCTT | 1 | 1 | NC | NC |
| 979 | 1859 | GAACAGTTCTTCACTAAGCT | 2 | 2 | NC | NC |
| 980 | 1860 | AGAACAGTTCTTCACTAAGC | 2 | 2 | NC | NC |
| 981 | 1874 | AATGAGTATCTGGTAGAACA | 2 | 2 | 2 | NC |
| 982 | 1875 | AAATGAGTATCTGGTAGAAC | 2 | 2 | 2 | NC |
| 983 | 1876 | TAAATGAGTATCTGGTAGAA | 1 | 1 | 2 | 1 |
| 984 | 1877 | ATAAATGAGTATCTGGTAGA | 1 | 2 | 1 | NC |
| 985 | 1878 | CATAAATGAGTATCTGGTAG | 2 | 2 | 1 | NC |
| 986 | 1879 | TCATAAATGAGTATCTGGTA | 2 | 2 | 2 | NC |
| 987 | 1890 | AATTGGCAAAATCATAAATG | 1 | 2 | NC | NC |
| 988 | 1893 | CAAAATTGGCAAAATCATAA | 1 | 3 | NC | NC |
| 989 | 1905 | ACCTGAGAACACCAAAATTG | 2 | NC | NC | NC |
| 990 | 1906 | AACCTGAGAACACCAAAATT | 2 | NC | NC | NC |
| 991 | 1907 | TAACCTGAGAACACCAAAAT | 2 | NC | NC | NC |
| 992 | 1908 | ATAACCTGAGAACACCAAAA | 2 | NC | NC | NC |
| 993 | 1909 | GATAACCTGAGAACACCAAA | 1 | NC | NC | NC |
| 994 | 1910 | CGATAACCTGAGAACACCAA | 2 | NC | NC | NC |
| 995 | 1911 | CCGATAACCTGAGAACACCA | 2 | NC | NC | NC |
| 996 | 1912 | TCCGATAACCTGAGAACACC | 2 | NC | NC | NC |
| 997 | 1913 | CTCCGATAACCTGAGAACAC | 2 | NC | NC | NC |
| 998 | 1914 | GCTCCGATAACCTGAGAACA | 3 | NC | NC | NC |
| 999 | 1915 | GGCTCCGATAACCTGAGAAC | 3 | NC | NC | NC |
| 1000 | 1916 | TGGCTCCGATAACCTGAGAA | 3 | NC | NC | NC |
| 1001 | 1917 | CTGGCTCCGATAACCTGAGA | 2 | NC | NC | NC |
| 1002 | 1919 | TGCTGGCTCCGATAACCTGA | 3 | NC | NC | NC |
| 1003 | 1934 | AAGGTCAAAGAGCGGTGCTG | 2 | NC | NC | NC |
| 1004 | 1938 | TGGCAAGGTCAAAGAGCGGT | 2 | NC | NC | NC |
| 1005 | 1939 | ATGGCAAGGTCAAAGAGCGG | 2 | NC | NC | NC |
| 1006 | 1940 | CATGGCAAGGTCAAAGAGCG | 2 | NC | NC | NC |
| 1007 | 1941 | GCATGGCAAGGTCAAAGAGC | 3 | NC | NC | NC |
| 1008 | 1942 | AGCATGGCAAGGTCAAAGAG | 2 | NC | NC | NC |
| 1009 | 1943 | AAGCATGGCAAGGTCAAAGA | 2 | NC | NC | NC |
| 1010 | 1944 | CAAGCATGGCAAGGTCAAAG | 2 | NC | NC | NC |
| 1011 | 1945 | GCAAGCATGGCAAGGTCAAA | 2 | NC | NC | NC |
| 1012 | 1955 | ACTATCTAAGGCAAGCATGG | 2 | 2 | NC | NC |
| 1013 | 1956 | GACTATCTAAGGCAAGCATG | 2 | 2 | NC | NC |
| 1014 | 1957 | GGACTATCTAAGGCAAGCAT | 3 | NC | NC | NC |
| 1015 | 1958 | TGGACTATCTAAGGCAAGCA | 2 | NC | NC | NC |
| 1016 | 1959 | CTGGACTATCTAAGGCAAGC | 2 | 2 | NC | NC |
| 1017 | 1960 | TCTGGACTATCTAAGGCAAG | 3 | NC | NC | NC |
| 1018 | 1961 | CTCTGGACTATCTAAGGCAA | 2 | 1 | NC | NC |
| 1019 | 1962 | TCTCTGGACTATCTAAGGCA | 2 | 2 | NC | NC |
| 1020 | 1963 | CTCTCTGGACTATCTAAGGC | 2 | 2 | NC | NC |
| 1021 | 1964 | ACTCTCTGGACTATCTAAGG | 2 | 2 | NC | NC |
| 1022 | 1965 | CACTCTCTGGACTATCTAAG | 2 | 2 | NC | NC |
| 1023 | 1979 | TTCCTCTGTCCAGCCACTCT | 2 | 1 | NC | NC |
| 1024 | 1981 | TCTTCCTCTGTCCAGCCACT | 2 | 2 | NC | NC |
| 1025 | 1982 | ATCTTCCTCTGTCCAGCCAC | 2 | 2 | NC | NC |
| 1026 | 1983 | CATCTTCCTCTGTCCAGCCA | 2 | 1 | NC | NC |
| 1027 | 1985 | ACCATCTTCCTCTGTCCAGC | 2 | 2 | NC | NC |
| 1028 | 1986 | GACCATCTTCCTCTGTCCAG | 2 | 2 | NC | NC |
| 1029 | 1989 | TGGGACCATCTTCCTCTGTC | 2 | 2 | NC | NC |
| 1030 | 1990 | TTGGGACCATCTTCCTCTGT | 2 | 2 | NC | NC |
| 1031 | 1991 | TTTGGGACCATCTTCCTCTG | 2 | 2 | NC | NC |
| 1032 | 1992 | CTTTGGGACCATCTTCCTCT | 2 | 1 | NC | NC |
| 1033 | 1993 | TCTTTGGGACCATCTTCCTC | 1 | NC | NC | NC |
| 1034 | 1994 | TTCTTTGGGACCATCTTCCT | 2 | 2 | NC | NC |
| 1035 | 1995 | CTTCTTTGGGACCATCTTCC | 2 | NC | NC | NC |
| 1036 | 1996 | CCTTCTTTGGGACCATCTTC | 2 | 2 | NC | NC |
| 1037 | 1997 | TCCTTCTTTGGGACCATCTT | 2 | 1 | NC | NC |
| 1038 | 2004 | CAGCAAGTCCTTCTTTGGGA | 2 | 2 | NC | NC |
| 1039 | 2005 | TCAGCAAGTCCTTCTTTGGG | 2 | 2 | NC | NC |
| 1040 | 2006 | TTCAGCAAGTCCTTCTTTGG | 2 | 1 | NC | NC |
| 1041 | 2007 | ATTCAGCAAGTCCTTCTTTG | 2 | 2 | NC | NC |
| 1042 | 2008 | TATTCAGCAAGTCCTTCTTT | 1 | NC | NC | NC |
| 1043 | 2009 | GTATTCAGCAAGTCCTTCTT | 2 | 2 | NC | NC |
| 1044 | 2010 | TGTATTCAGCAAGTCCTTCT | 2 | 2 | NC | NC |
| 1045 | 2011 | ATGTATTCAGCAAGTCCTTC | 2 | 2 | NC | NC |
| 1046 | 2012 | AATGTATTCAGCAAGTCCTT | 1 | 2 | NC | NC |
| 1047 | 2013 | CAATGTATTCAGCAAGTCCT | 2 | 2 | NC | NC |
| 1048 | 2014 | ACAATGTATTCAGCAAGTCC | 2 | 1 | NC | NC |
| 1049 | 2015 | AACAATGTATTCAGCAAGTC | 2 | 2 | NC | NC |
| 1050 | 2016 | CAACAATGTATTCAGCAAGT | 2 | 2 | NC | NC |
| 1051 | 2017 | TCAACAATGTATTCAGCAAG | 2 | 2 | NC | NC |
| 1052 | 2018 | CTCAACAATGTATTCAGCAA | 1 | 2 | NC | NC |
| 1053 | 2019 | ACTCAACAATGTATTCAGCA | 1 | 1 | NC | NC |
| 1054 | 2020 | AACTCAACAATGTATTCAGC | 2 | 3 | NC | NC |
| 1055 | 2021 | AAACTCAACAATGTATTCAG | 2 | 2 | NC | NC |
| 1056 | 2022 | GAAACTCAACAATGTATTCA | 2 | 2 | NC | NC |
| 1057 | 2023 | AGAAACTCAACAATGTATTC | 2 | 1 | NC | NC |
| 1058 | 2024 | CAGAAACTCAACAATGTATT | 2 | 2 | NC | NC |
| 1059 | 2025 | TCAGAAACTCAACAATGTAT | 1 | 2 | NC | NC |
| 1060 | 2026 | TTCAGAAACTCAACAATGTA | 1 | 2 | 2 | NC |
| 1061 | 2027 | CTTCAGAAACTCAACAATGT | 1 | 2 | 2 | NC |
| 1062 | 2028 | TCTTCAGAAACTCAACAATG | 1 | 2 | 1 | NC |
| 1063 | 2029 | TTCTTCAGAAACTCAACAAT | 2 | 2 | 2 | NC |
| 1064 | 2030 | CTTCTTCAGAAACTCAACAA | 2 | 2 | 2 | NC |
| 1065 | 2031 | TCTTCTTCAGAAACTCAACA | 2 | 2 | 1 | NC |
| 1066 | 2032 | TTCTTCTTCAGAAACTCAAC | 1 | 2 | 2 | NC |
| 1067 | 2040 | TCTCAGCCTTCTTCTTCAGA | 2 | NC | NC | NC |
| 1068 | 2041 | ATCTCAGCCTTCTTCTTCAG | 2 | NC | NC | NC |
| 1069 | 2042 | CATCTCAGCCTTCTTCTTCA | 1 | NC | NC | NC |
| 1070 | 2043 | GCATCTCAGCCTTCTTCTTC | 2 | NC | NC | NC |
| 1071 | 2044 | AGCATCTCAGCCTTCTTCTT | 1 | NC | NC | NC |
| 1072 | 2045 | AAGCATCTCAGCCTTCTTCT | 1 | NC | NC | NC |
| 1073 | 2046 | CAAGCATCTCAGCCTTCTTC | 1 | NC | NC | NC |
| 1074 | 2047 | GCAAGCATCTCAGCCTTCTT | 2 | NC | NC | NC |
| 1075 | 2048 | TGCAAGCATCTCAGCCTTCT | 2 | NC | NC | NC |
| 1076 | 2049 | CTGCAAGCATCTCAGCCTTC | 2 | NC | NC | NC |
| 1077 | 2050 | TCTGCAAGCATCTCAGCCTT | 2 | NC | NC | NC |
| 1078 | 2051 | GTCTGCAAGCATCTCAGCCT | 2 | NC | NC | NC |
| 1079 | 2052 | AGTCTGCAAGCATCTCAGCC | 2 | NC | NC | NC |
| 1080 | 2053 | TAGTCTGCAAGCATCTCAGC | 2 | NC | NC | NC |
| 1081 | 2054 | ATAGTCTGCAAGCATCTCAG | 2 | NC | NC | NC |
| 1082 | 2055 | AATAGTCTGCAAGCATCTCA | 2 | NC | NC | NC |
| 1083 | 2056 | AAATAGTCTGCAAGCATCTC | 1 | 2 | 2 | NC |
| 1084 | 2057 | GAAATAGTCTGCAAGCATCT | 2 | 2 | 2 | 2 |
| 1085 | 2058 | AGAAATAGTCTGCAAGCATC | 2 | 2 | 2 | 2 |
| 1086 | 2059 | GAGAAATAGTCTGCAAGCAT | 2 | 2 | 2 | 3 |
| 1087 | 2060 | AGAGAAATAGTCTGCAAGCA | 1 | NC | 2 | 2 |
| 1088 | 2061 | AAGAGAAATAGTCTGCAAGC | 2 | NC | NC | NC |
| 1089 | 2062 | AAAGAGAAATAGTCTGCAAG | 2 | 2 | NC | NC |
| 1090 | 2063 | CAAAGAGAAATAGTCTGCAA | 1 | 1 | NC | NC |
| 1091 | 2064 | CCAAAGAGAAATAGTCTGCA | 1 | 2 | NC | NC |
| 1092 | 2065 | TCCAAAGAGAAATAGTCTGC | 1 | 1 | NC | NC |
| 1093 | 2066 | TTCCAAAGAGAAATAGTCTG | 2 | 2 | NC | NC |
| 1094 | 2074 | TCATCAATTTCCAAAGAGAA | 2 | 2 | NC | NC |
| 1095 | 2075 | CTCATCAATTTCCAAAGAGA | 2 | 2 | NC | NC |
| 1096 | 2076 | CCTCATCAATTTCCAAAGAG | 2 | 2 | NC | NC |
| 1097 | 2077 | TCCTCATCAATTTCCAAAGA | 2 | 2 | NC | NC |
| 1098 | 2078 | TTCCTCATCAATTTCCAAAG | 2 | 2 | NC | NC |
| 1099 | 2079 | CTTCCTCATCAATTTCCAAA | 2 | 2 | NC | NC |
| 1100 | 2080 | CCTTCCTCATCAATTTCCAA | 2 | 2 | NC | NC |
| 1101 | 2081 | CCCTTCCTCATCAATTTCCA | 2 | 1 | NC | NC |
| 1102 | 2082 | TCCCTTCCTCATCAATTTCC | 1 | NC | NC | NC |
| 1103 | 2083 | TTCCCTTCCTCATCAATTTC | 1 | 2 | NC | NC |
| 1104 | 2084 | GTTCCCTTCCTCATCAATTT | 2 | 2 | NC | NC |
| 1105 | 2085 | GGTTCCCTTCCTCATCAATT | 2 | 2 | NC | NC |
| 1106 | 2086 | AGGTTCCCTTCCTCATCAAT | 2 | NC | NC | NC |
| 1107 | 2087 | CAGGTTCCCTTCCTCATCAA | 2 | 2 | NC | NC |
| 1108 | 2088 | TCAGGTTCCCTTCCTCATCA | 1 | 2 | NC | NC |
| 1109 | 2089 | ATCAGGTTCCCTTCCTCATC | 2 | 1 | 2 | 2 |
| 1110 | 2090 | AATCAGGTTCCCTTCCTCAT | 2 | 2 | 2 | 1 |
| 1111 | 2091 | CAATCAGGTTCCCTTCCTCA | 1 | 2 | 1 | 1 |
| 1112 | 2092 | CCAATCAGGTTCCCTTCCTC | 2 | 2 | 1 | 1 |
| 1113 | 2117 | ATAGTTGTCAATCAGAAGGG | 2 | 2 | NC | NC |
| 1114 | 2118 | CATAGTTGTCAATCAGAAGG | 2 | 2 | NC | NC |
| 1115 | 2119 | ACATAGTTGTCAATCAGAAG | 2 | 2 | NC | NC |
| 1116 | 2120 | CACATAGTTGTCAATCAGAA | 2 | 2 | NC | NC |
| 1117 | 2121 | GCACATAGTTGTCAATCAGA | 2 | 1 | NC | NC |
| 1118 | 2122 | GGCACATAGTTGTCAATCAG | 2 | 1 | NC | NC |
| 1119 | 2123 | GGGCACATAGTTGTCAATCA | 2 | 3 | NC | NC |
| 1120 | 2151 | GAATGAAGATAGGCAGTCCC | 2 | NC | 2 | 2 |
| 1121 | 2152 | AGAATGAAGATAGGCAGTCC | 1 | 2 | 2 | 2 |
| 1122 | 2153 | AAGAATGAAGATAGGCAGTC | 1 | 2 | 2 | 2 |
| 1123 | 2154 | GAAGAATGAAGATAGGCAGT | 2 | 2 | 2 | 1 |
| 1124 | 2155 | CGAAGAATGAAGATAGGCAG | 1 | 2 | 2 | 1 |
| 1125 | 2156 | TCGAAGAATGAAGATAGGCA | 2 | 2 | 2 | 2 |
| 1126 | 2169 | CCTCAGTGGCTAGTCGAAGA | 2 | 2 | NC | NC |
| 1127 | 2182 | TCGTCCCAATTCACCTCAGT | 2 | NC | NC | NC |
| 1128 | 2183 | TTCGTCCCAATTCACCTCAG | 3 | NC | NC | NC |
| 1129 | 2184 | CTTCGTCCCAATTCACCTCA | 3 | NC | NC | NC |
| 1130 | 2185 | TCTTCGTCCCAATTCACCTC | 2 | NC | NC | NC |
| 1131 | 2186 | TTCTTCGTCCCAATTCACCT | 2 | 2 | NC | NC |
| 1132 | 2187 | TTTCTTCGTCCCAATTCACC | 2 | 2 | NC | NC |
| 1133 | 2188 | TTTTCTTCGTCCCAATTCAC | 2 | 2 | NC | NC |
| 1134 | 2189 | CTTTTCTTCGTCCCAATTCA | 2 | 1 | NC | NC |
| 1135 | 2190 | CCTTTTCTTCGTCCCAATTC | 1 | 2 | NC | NC |
| 1136 | 2191 | TCCTTTTCTTCGTCCCAATT | 2 | 2 | NC | NC |
| 1137 | 2192 | TTCCTTTTCTTCGTCCCAAT | 1 | 1 | NC | NC |
| 1138 | 2193 | ATTCCTTTTCTTCGTCCCAA | 2 | 2 | NC | NC |
| 1139 | 2194 | CATTCCTTTTCTTCGTCCCA | 2 | 2 | NC | NC |
| 1140 | 2195 | ACATTCCTTTTCTTCGTCCC | 2 | 2 | NC | NC |
| 1141 | 2196 | AACATTCCTTTTCTTCGTCC | 2 | 2 | NC | NC |
| 1142 | 2197 | AAACATTCCTTTTCTTCGTC | 2 | 2 | NC | NC |
| 1143 | 2198 | AAAACATTCCTTTTCTTCGT | 2 | 2 | NC | NC |
| 1144 | 2199 | CAAAACATTCCTTTTCTTCG | 2 | 1 | NC | NC |
| 1145 | 2200 | TCAAAACATTCCTTTTCTTC | 1 | 2 | NC | NC |
| 1146 | 2201 | TTCAAAACATTCCTTTTCTT | 1 | 2 | NC | NC |
| 1147 | 2202 | TTTCAAAACATTCCTTTTCT | 1 | 2 | NC | NC |
| 1148 | 2203 | CTTTCAAAACATTCCTTTTC | 1 | 3 | NC | NC |
| 1149 | 2204 | GCTTTCAAAACATTCCTTTT | 1 | 2 | NC | NC |
| 1150 | 2205 | GGCTTTCAAAACATTCCTTT | 1 | 2 | NC | NC |
| 1151 | 2206 | AGGCTTTCAAAACATTCCTT | 2 | 2 | NC | NC |
| 1152 | 2207 | GAGGCTTTCAAAACATTCCT | 2 | 2 | NC | NC |
| 1153 | 2208 | TGAGGCTTTCAAAACATTCC | 1 | 2 | NC | NC |
| 1154 | 2209 | CTGAGGCTTTCAAAACATTC | 1 | 1 | NC | NC |
| 1155 | 2210 | ACTGAGGCTTTCAAAACATT | 1 | 2 | NC | NC |
| 1156 | 2211 | TACTGAGGCTTTCAAAACAT | 2 | 2 | NC | NC |
| 1157 | 2212 | TTACTGAGGCTTTCAAAACA | 2 | NC | NC | NC |
| 1158 | 2213 | TTTACTGAGGCTTTCAAAAC | 2 | 2 | NC | NC |
| 1159 | 2214 | CTTTACTGAGGCTTTCAAAA | 2 | 2 | NC | NC |
| 1160 | 2215 | TCTTTACTGAGGCTTTCAAA | 2 | NC | NC | NC |
| 1161 | 2216 | TTCTTTACTGAGGCTTTCAA | 2 | 2 | NC | NC |
| 1162 | 2217 | ATTCTTTACTGAGGCTTTCA | 2 | 3 | NC | NC |
| 1163 | 2218 | CATTCTTTACTGAGGCTTTC | 2 | 2 | NC | NC |
| 1164 | 2219 | GCATTCTTTACTGAGGCTTT | 2 | NC | NC | NC |
| 1165 | 2220 | CGCATTCTTTACTGAGGCTT | 2 | NC | NC | NC |
| 1166 | 2221 | GCGCATTCTTTACTGAGGCT | 2 | NC | NC | NC |
| 1167 | 2222 | AGCGCATTCTTTACTGAGGC | 2 | NC | NC | NC |
| 1168 | 2223 | TAGCGCATTCTTTACTGAGG | 3 | NC | NC | NC |
| 1169 | 2224 | ATAGCGCATTCTTTACTGAG | 2 | NC | NC | NC |
| 1170 | 2225 | CATAGCGCATTCTTTACTGA | 2 | NC | NC | NC |
| 1171 | 2226 | ACATAGCGCATTCTTTACTG | 2 | NC | NC | NC |
| 1172 | 2227 | AACATAGCGCATTCTTTACT | 2 | NC | NC | NC |
| 1173 | 2228 | GAACATAGCGCATTCTTTAC | 3 | NC | NC | NC |
| 1174 | 2229 | AGAACATAGCGCATTCTTTA | 2 | NC | NC | NC |
| 1175 | 2230 | TAGAACATAGCGCATTCTTT | 3 | NC | NC | NC |
| 1176 | 2231 | ATAGAACATAGCGCATTCTT | 2 | NC | NC | NC |
| 1177 | 2232 | AATAGAACATAGCGCATTCT | 2 | NC | NC | NC |
| 1178 | 2233 | GAATAGAACATAGCGCATTC | 2 | NC | NC | NC |
| 1179 | 2234 | GGAATAGAACATAGCGCATT | 3 | NC | NC | NC |
| 1180 | 2235 | TGGAATAGAACATAGCGCAT | 2 | NC | NC | NC |
| 1181 | 2236 | ATGGAATAGAACATAGCGCA | 2 | NC | NC | NC |
| 1182 | 2237 | GATGGAATAGAACATAGCGC | 2 | NC | NC | NC |
| 1183 | 2238 | GGATGGAATAGAACATAGCG | 3 | NC | NC | NC |
| 1184 | 2239 | CGGATGGAATAGAACATAGC | 2 | NC | NC | NC |
| 1185 | 2240 | CCGGATGGAATAGAACATAG | 3 | NC | NC | NC |
| 1186 | 2252 | TATGTACTGCTTCCGGATGG | 2 | 2 | NC | NC |
| 1187 | 2253 | ATATGTACTGCTTCCGGATG | 3 | 2 | NC | NC |
| 1188 | 2254 | GATATGTACTGCTTCCGGAT | 3 | 2 | NC | NC |
| 1189 | 2255 | AGATATGTACTGCTTCCGGA | 3 | 2 | NC | NC |
| 1190 | 2256 | CAGATATGTACTGCTTCCGG | 3 | 3 | NC | NC |
| 1191 | 2257 | TCAGATATGTACTGCTTCCG | 2 | 1 | NC | NC |
| 1192 | 2258 | CTCAGATATGTACTGCTTCC | 2 | 2 | NC | NC |
| 1193 | 2259 | CCTCAGATATGTACTGCTTC | 2 | 2 | NC | NC |
| 1194 | 2260 | TCCTCAGATATGTACTGCTT | 2 | 2 | NC | NC |
| 1195 | 2261 | CTCCTCAGATATGTACTGCT | 2 | 2 | NC | NC |
| 1196 | 2262 | ACTCCTCAGATATGTACTGC | 2 | NC | NC | NC |
| 1197 | 2264 | CGACTCCTCAGATATGTACT | 2 | 1 | NC | NC |
| 1198 | 2265 | TCGACTCCTCAGATATGTAC | 2 | NC | NC | NC |
| 1199 | 2266 | GTCGACTCCTCAGATATGTA | 3 | 2 | NC | NC |
| 1200 | 2267 | GGTCGACTCCTCAGATATGT | 3 | 2 | NC | NC |
| 1201 | 2268 | GGGTCGACTCCTCAGATATG | 3 | 2 | NC | NC |
| 1202 | 2269 | AGGGTCGACTCCTCAGATAT | 2 | NC | NC | NC |
| 1203 | 2290 | ACTTCACTCTGCTGGCCTGA | 2 | 1 | NC | NC |
| 1204 | 2302 | ATGGAGCCAGGCACTTCACT | 2 | 1 | NC | NC |
| 1205 | 2303 | AATGGAGCCAGGCACTTCAC | 2 | 2 | NC | NC |
| 1206 | 2304 | GAATGGAGCCAGGCACTTCA | 2 | 2 | NC | NC |
| 1207 | 2306 | TGGAATGGAGCCAGGCACTT | 2 | 3 | NC | NC |
| 1208 | 2308 | TTTGGAATGGAGCCAGGCAC | 2 | 2 | NC | NC |
| 1209 | 2309 | GTTTGGAATGGAGCCAGGCA | 2 | 2 | NC | NC |
| 1210 | 2310 | AGTTTGGAATGGAGCCAGGC | 1 | 2 | NC | NC |
| 1211 | 2311 | GAGTTTGGAATGGAGCCAGG | 1 | 2 | NC | NC |
| 1212 | 2312 | GGAGTTTGGAATGGAGCCAG | 1 | 2 | NC | NC |
| 1213 | 2313 | AGGAGTTTGGAATGGAGCCA | 1 | NC | NC | NC |
| 1214 | 2314 | CAGGAGTTTGGAATGGAGCC | 2 | 3 | NC | NC |
| 1215 | 2324 | AGTCCACTTCCAGGAGTTTG | 2 | 2 | NC | NC |
| 1216 | 2325 | CAGTCCACTTCCAGGAGTTT | 2 | 2 | NC | NC |
| 1217 | 2326 | ACAGTCCACTTCCAGGAGTT | 1 | 2 | NC | NC |
| 1218 | 2329 | TCCACAGTCCACTTCCAGGA | 2 | 2 | NC | NC |
| 1219 | 2330 | TTCCACAGTCCACTTCCAGG | 1 | NC | NC | NC |
| 1220 | 2331 | GTTCCACAGTCCACTTCCAG | 2 | 3 | NC | NC |
| 1221 | 2332 | TGTTCCACAGTCCACTTCCA | 2 | 2 | NC | NC |
| 1222 | 2333 | GTGTTCCACAGTCCACTTCC | 2 | 2 | NC | NC |
| 1223 | 2334 | TGTGTTCCACAGTCCACTTC | 2 | 1 | NC | NC |
| 1224 | 2344 | TTATAGACAATGTGTTCCAC | 2 | NC | NC | NC |
| 1225 | 2345 | TTTATAGACAATGTGTTCCA | 1 | NC | NC | NC |
| 1226 | 2346 | CTTTATAGACAATGTGTTCC | 2 | NC | NC | NC |
| 1227 | 2347 | GCTTTATAGACAATGTGTTC | 1 | NC | NC | NC |
| 1228 | 2348 | GGCTTTATAGACAATGTGTT | 1 | NC | NC | NC |
| 1229 | 2349 | AGGCTTTATAGACAATGTGT | 1 | NC | NC | NC |
| 1230 | 2350 | AAGGCTTTATAGACAATGTG | 1 | NC | NC | NC |
| 1231 | 2351 | CAAGGCTTTATAGACAATGT | 1 | NC | NC | NC |
| 1232 | 2352 | GCAAGGCTTTATAGACAATG | 1 | NC | NC | NC |
| 1233 | 2353 | CGCAAGGCTTTATAGACAAT | 2 | NC | NC | NC |
| 1234 | 2380 | AAATGTTTAGGAGGCAGAAT | 2 | 1 | NC | NC |
| 1235 | 2381 | GAAATGTTTAGGAGGCAGAA | 2 | 2 | NC | NC |
| 1236 | 2382 | TGAAATGTTTAGGAGGCAGA | 2 | 2 | NC | NC |
| 1237 | 2383 | GTGAAATGTTTAGGAGGCAG | 3 | 2 | NC | NC |
| 1238 | 2384 | TGTGAAATGTTTAGGAGGCA | 2 | 2 | NC | NC |
| 1239 | 2385 | CTGTGAAATGTTTAGGAGGC | 2 | 2 | NC | NC |
| 1240 | 2386 | TCTGTGAAATGTTTAGGAGG | 2 | 2 | NC | NC |
| 1241 | 2387 | TTCTGTGAAATGTTTAGGAG | 2 | 2 | NC | NC |
| 1242 | 2388 | CTTCTGTGAAATGTTTAGGA | 1 | 1 | NC | NC |
| 1243 | 2389 | TCTTCTGTGAAATGTTTAGG | 1 | 2 | NC | NC |
| 1244 | 2390 | ATCTTCTGTGAAATGTTTAG | 2 | 2 | NC | NC |
| 1245 | 2391 | CATCTTCTGTGAAATGTTTA | 2 | 2 | NC | NC |
| 1246 | 2392 | CCATCTTCTGTGAAATGTTT | 2 | 2 | NC | NC |
| 1247 | 2393 | TCCATCTTCTGTGAAATGTT | 2 | 2 | NC | NC |
| 1248 | 2394 | TTCCATCTTCTGTGAAATGT | 1 | NC | NC | NC |
| 1249 | 2395 | TTTCCATCTTCTGTGAAATG | 1 | 2 | NC | NC |
| 1250 | 2396 | ATTTCCATCTTCTGTGAAAT | 1 | 2 | NC | NC |
| 1251 | 2397 | TATTTCCATCTTCTGTGAAA | 1 | 2 | NC | NC |
| 1252 | 2398 | ATATTTCCATCTTCTGTGAA | 2 | 2 | NC | NC |
| 1253 | 2399 | GATATTTCCATCTTCTGTGA | 2 | 1 | NC | NC |
| 1254 | 2424 | GATCAGGCAGGTTAGCAAGC | 2 | NC | NC | NC |
| 1255 | 2425 | AGATCAGGCAGGTTAGCAAG | 1 | 1 | NC | NC |
| 1256 | 2426 | TAGATCAGGCAGGTTAGCAA | 2 | NC | NC | NC |
| 1257 | 2427 | ATAGATCAGGCAGGTTAGCA | 2 | 1 | NC | NC |
| 1258 | 2428 | TATAGATCAGGCAGGTTAGC | 2 | 3 | NC | NC |
| 1259 | 2429 | GTATAGATCAGGCAGGTTAG | 2 | 2 | NC | NC |
| 1260 | 2430 | TGTATAGATCAGGCAGGTTA | 2 | 2 | NC | NC |
| 1261 | 2431 | TTGTATAGATCAGGCAGGTT | 2 | NC | NC | NC |
| 1262 | 2432 | TTTGTATAGATCAGGCAGGT | 2 | 2 | NC | NC |
| 1263 | 2433 | CTTTGTATAGATCAGGCAGG | 2 | 2 | NC | NC |
| 1264 | 2434 | ACTTTGTATAGATCAGGCAG | 2 | 2 | NC | NC |
| 1265 | 2435 | GACTTTGTATAGATCAGGCA | 2 | 2 | NC | NC |
| 1266 | 2436 | AGACTTTGTATAGATCAGGC | 3 | 2 | NC | NC |
| 1267 | 2437 | AAGACTTTGTATAGATCAGG | 2 | 2 | NC | NC |
| 1268 | 2438 | AAAGACTTTGTATAGATCAG | 2 | 1 | NC | NC |
| 1269 | 2439 | CAAAGACTTTGTATAGATCA | 2 | 2 | NC | NC |
| 1270 | 2449 | TAACACCTCTCAAAGACTTT | 2 | 1 | NC | NC |
| 1271 | 2450 | TTAACACCTCTCAAAGACTT | 1 | 2 | NC | NC |
| 1272 | 2451 | TTTAACACCTCTCAAAGACT | 1 | 2 | NC | NC |
| 1273 | 2452 | ATTTAACACCTCTCAAAGAC | 2 | 3 | NC | NC |
| 1274 | 2453 | TATTTAACACCTCTCAAAGA | 2 | 2 | NC | NC |
| 1275 | 2454 | ATATTTAACACCTCTCAAAG | 2 | 3 | NC | NC |
| 1276 | 2455 | CATATTTAACACCTCTCAAA | 2 | NC | NC | NC |
| 1277 | 2456 | CCATATTTAACACCTCTCAA | 2 | 2 | NC | NC |
| 1278 | 2457 | ACCATATTTAACACCTCTCA | 2 | 1 | NC | NC |
| 1279 | 2458 | AACCATATTTAACACCTCTC | 2 | NC | NC | NC |
| 1280 | 2459 | TAACCATATTTAACACCTCT | 2 | NC | NC | NC |
| 1281 | 2460 | ATAACCATATTTAACACCTC | 2 | NC | NC | NC |
| 1282 | 2461 | AATAACCATATTTAACACCT | 2 | NC | NC | NC |
| 1283 | 2462 | AAATAACCATATTTAACACC | 2 | NC | NC | NC |
| 1284 | 2469 | AGTGCATAAATAACCATATT | 2 | NC | NC | NC |
| 1285 | 2470 | CAGTGCATAAATAACCATAT | 2 | NC | NC | NC |
| 1286 | 2471 | ACAGTGCATAAATAACCATA | 2 | NC | NC | NC |
| 1287 | 2472 | CACAGTGCATAAATAACCAT | 2 | NC | NC | NC |
| 1288 | 2473 | CCACAGTGCATAAATAACCA | 2 | NC | NC | NC |
| 1289 | 2474 | CCCACAGTGCATAAATAACC | 2 | NC | NC | NC |
| 1290 | 2475 | TCCCACAGTGCATAAATAAC | 2 | NC | NC | NC |
| 1291 | 2476 | ATCCCACAGTGCATAAATAA | 2 | NC | NC | NC |
| 1292 | 2477 | CATCCCACAGTGCATAAATA | 2 | NC | NC | NC |
| 1293 | 2478 | ACATCCCACAGTGCATAAAT | 2 | 2 | NC | NC |
| 1294 | 2479 | CACATCCCACAGTGCATAAA | 2 | 2 | NC | NC |
| 1295 | 2486 | AGAAGAACACATCCCACAGT | 1 | NC | NC | NC |
| 1296 | 2487 | AAGAAGAACACATCCCACAG | 1 | NC | NC | NC |
| 1297 | 2488 | AAAGAAGAACACATCCCACA | 2 | NC | NC | NC |
| 1298 | 2489 | GAAAGAAGAACACATCCCAC | 2 | NC | NC | NC |
| 1299 | 2490 | AGAAAGAAGAACACATCCCA | 2 | NC | NC | NC |
| 1300 | 2491 | GAGAAAGAAGAACACATCCC | 2 | NC | NC | NC |
| 1301 | 2492 | AGAGAAAGAAGAACACATCC | 1 | NC | NC | NC |
| 1302 | 2493 | CAGAGAAAGAAGAACACATC | 2 | NC | NC | NC |
| 1303 | 2494 | ACAGAGAAAGAAGAACACAT | 1 | NC | NC | NC |
| 1304 | 2495 | TACAGAGAAAGAAGAACACA | 2 | NC | NC | NC |
| 1305 | 2496 | ATACAGAGAAAGAAGAACAC | 2 | NC | NC | NC |
| 1306 | 2497 | AATACAGAGAAAGAAGAACA | 1 | NC | NC | NC |
| 1307 | 2498 | GAATACAGAGAAAGAAGAAC | 1 | NC | NC | NC |
| 1308 | 2499 | GGAATACAGAGAAAGAAGAA | 1 | NC | NC | NC |
| 1309 | 2500 | CGGAATACAGAGAAAGAAGA | 2 | NC | NC | NC |
| 1310 | 2501 | TCGGAATACAGAGAAAGAAG | 2 | NC | NC | NC |
| 1311 | 2502 | ATCGGAATACAGAGAAAGAA | 2 | 2 | NC | NC |
| 1312 | 2503 | TATCGGAATACAGAGAAAGA | 2 | 2 | NC | NC |
| 1313 | 2504 | GTATCGGAATACAGAGAAAG | 2 | 2 | NC | NC |
| 1314 | 2513 | CAACACTTTGTATCGGAATA | 3 | 1 | NC | NC |
| 1315 | 2524 | ACACTTTGATACAACACTTT | 2 | 2 | NC | NC |
| 1316 | 2525 | CACACTTTGATACAACACTT | 2 | 2 | NC | NC |
| 1317 | 2526 | TCACACTTTGATACAACACT | 2 | NC | NC | NC |
| 1318 | 2535 | CTTTGTATATCACACTTTGA | 2 | NC | NC | NC |
| 1319 | 2536 | ACTTTGTATATCACACTTTG | 1 | NC | NC | NC |
| 1320 | 2537 | CACTTTGTATATCACACTTT | 2 | NC | NC | NC |
| 1321 | 2538 | ACACTTTGTATATCACACTT | 2 | NC | NC | NC |
| 1322 | 2539 | TACACTTTGTATATCACACT | 2 | NC | NC | NC |
| 1323 | 2540 | GTACACTTTGTATATCACAC | 2 | NC | NC | NC |
| 1324 | 2541 | GGTACACTTTGTATATCACA | 3 | NC | NC | NC |
| 1325 | 2542 | TGGTACACTTTGTATATCAC | 2 | NC | NC | NC |
| 1326 | 2543 | TTGGTACACTTTGTATATCA | 2 | NC | NC | NC |
| 1327 | 2544 | GTTGGTACACTTTGTATATC | 2 | NC | NC | NC |
| 1328 | 2545 | TGTTGGTACACTTTGTATAT | 2 | NC | NC | NC |
| 1329 | 2546 | ATGTTGGTACACTTTGTATA | 2 | NC | NC | NC |
| 1330 | 2547 | TATGTTGGTACACTTTGTAT | 2 | NC | NC | NC |
| 1331 | 2548 | TTATGTTGGTACACTTTGTA | 2 | NC | NC | NC |
| 1332 | 2549 | CTTATGTTGGTACACTTTGT | 2 | NC | NC | NC |
| 1333 | 2550 | ACTTATGTTGGTACACTTTG | 2 | NC | NC | NC |
| 1334 | 2551 | CACTTATGTTGGTACACTTT | 3 | NC | NC | NC |
| 1335 | 2552 | ACACTTATGTTGGTACACTT | 2 | NC | NC | NC |
| 1336 | 2569 | AGTCTTAAGTGCTACCAACA | 1 | 1 | NC | NC |
| 1337 | 2570 | AAGTCTTAAGTGCTACCAAC | 2 | 2 | NC | NC |
| 1338 | 2571 | TAAGTCTTAAGTGCTACCAA | 2 | 2 | NC | NC |
| 1339 | 2572 | ATAAGTCTTAAGTGCTACCA | 2 | 2 | NC | NC |
| 1340 | 2573 | TATAAGTCTTAAGTGCTACC | 2 | 1 | NC | NC |
| 1341 | 2574 | GTATAAGTCTTAAGTGCTAC | 2 | NC | NC | NC |
| 1342 | 2575 | AGTATAAGTCTTAAGTGCTA | 2 | 2 | NC | NC |
| 1343 | 2576 | AAGTATAAGTCTTAAGTGCT | 2 | 2 | NC | NC |
| 1344 | 2577 | CAAGTATAAGTCTTAAGTGC | 2 | 2 | NC | NC |
| 1345 | 2578 | GCAAGTATAAGTCTTAAGTG | 2 | 2 | NC | NC |
| 1346 | 2579 | GGCAAGTATAAGTCTTAAGT | 2 | 2 | NC | NC |
| 1347 | 2580 | AGGCAAGTATAAGTCTTAAG | 2 | 2 | NC | NC |
| 1348 | 2581 | AAGGCAAGTATAAGTCTTAA | 2 | 2 | NC | NC |
| 1349 | 2582 | GAAGGCAAGTATAAGTCTTA | 2 | 2 | NC | NC |
| 1350 | 2583 | AGAAGGCAAGTATAAGTCTT | 2 | 2 | NC | NC |
| 1351 | 2584 | CAGAAGGCAAGTATAAGTCT | 2 | NC | NC | NC |
| 1352 | 2585 | TCAGAAGGCAAGTATAAGTC | 2 | NC | NC | NC |
| 1353 | 2586 | ATCAGAAGGCAAGTATAAGT | 2 | NC | NC | NC |
| 1354 | 2587 | TATCAGAAGGCAAGTATAAG | 2 | NC | NC | NC |
| 1355 | 2588 | CTATCAGAAGGCAAGTATAA | 1 | NC | NC | NC |
| 1356 | 2589 | ACTATCAGAAGGCAAGTATA | 2 | NC | NC | NC |
| 1357 | 2590 | TACTATCAGAAGGCAAGTAT | 2 | NC | NC | NC |
| 1358 | 2591 | ATACTATCAGAAGGCAAGTA | 2 | NC | NC | NC |
| 1359 | 2592 | AATACTATCAGAAGGCAAGT | 2 | NC | NC | NC |
| 1360 | 2593 | GAATACTATCAGAAGGCAAG | 1 | NC | NC | NC |
| 1361 | 2594 | GGAATACTATCAGAAGGCAA | 1 | NC | NC | NC |
| 1362 | 2595 | AGGAATACTATCAGAAGGCA | 2 | NC | NC | NC |
| 1363 | 2596 | AAGGAATACTATCAGAAGGC | 2 | NC | NC | NC |
| 1364 | 2597 | AAAGGAATACTATCAGAAGG | 2 | NC | NC | NC |
| 1365 | 2598 | TAAAGGAATACTATCAGAAG | 2 | NC | NC | NC |
| 1366 | 2599 | ATAAAGGAATACTATCAGAA | 1 | NC | NC | NC |
| 1367 | 2600 | TATAAAGGAATACTATCAGA | 1 | NC | NC | NC |
| 1368 | 2601 | GTATAAAGGAATACTATCAG | 1 | NC | NC | NC |
| 1369 | 2602 | TGTATAAAGGAATACTATCA | 2 | NC | NC | NC |
| 1370 | 2603 | GTGTATAAAGGAATACTATC | 2 | NC | NC | NC |
| 1371 | 2604 | TGTGTATAAAGGAATACTAT | 1 | NC | NC | NC |
| 1372 | 2605 | CTGTGTATAAAGGAATACTA | 2 | NC | NC | NC |
| 1373 | 2606 | ACTGTGTATAAAGGAATACT | 2 | NC | NC | NC |
| 1374 | 2607 | CACTGTGTATAAAGGAATAC | 2 | NC | NC | NC |
| 1375 | 2608 | CCACTGTGTATAAAGGAATA | 2 | NC | NC | NC |
| 1376 | 2609 | TCCACTGTGTATAAAGGAAT | 2 | NC | NC | NC |
| 1377 | 2610 | ATCCACTGTGTATAAAGGAA | 2 | NC | NC | NC |
| 1378 | 2611 | AATCCACTGTGTATAAAGGA | 2 | NC | NC | NC |
| 1379 | 2612 | CAATCCACTGTGTATAAAGG | 2 | NC | NC | NC |
| 1380 | 2613 | TCAATCCACTGTGTATAAAG | 2 | NC | NC | NC |
| 1381 | 2614 | ATCAATCCACTGTGTATAAA | 2 | NC | NC | NC |
| 1382 | 2615 | AATCAATCCACTGTGTATAA | 2 | NC | NC | NC |
| 1383 | 2616 | TAATCAATCCACTGTGTATA | 2 | NC | NC | NC |
| 1384 | 2617 | ATAATCAATCCACTGTGTAT | 2 | NC | NC | NC |
| 1385 | 2618 | TATAATCAATCCACTGTGTA | 2 | NC | NC | NC |
| 1386 | 2619 | TTATAATCAATCCACTGTGT | 2 | NC | NC | NC |
| 1387 | 2620 | TTTATAATCAATCCACTGTG | 2 | NC | NC | NC |
| 1388 | 2621 | ATTTATAATCAATCCACTGT | 2 | NC | NC | NC |
| 1389 | 2622 | TATTTATAATCAATCCACTG | 1 | NC | NC | NC |
| 1390 | 2639 | GTTAAGACACATCTATTTAT | 1 | NC | NC | NC |
| 1391 | 2640 | TGTTAAGACACATCTATTTA | 1 | NC | NC | NC |
| 1392 | 2641 | ATGTTAAGACACATCTATTT | 1 | NC | NC | NC |
| 1393 | 2642 | TATGTTAAGACACATCTATT | 2 | NC | NC | NC |

dsRNAs

### Selection of 19mer Oligonucleotide Sequences

[0412] All sense 18mer sub-sequences and complementary antisense sequences per transcript were generated. An A nucleotide was added to the 3′ end of the sense strand, with a complementary U at the 5′ end of the antisense strand, to yield a 19mer duplex. This nucleotide pair was chosen because the antisense (“guide”) strand's first (5′) nucleotide is not exposed and does not bind to target mRNAs when loaded in the RISC complex, and the core AGO protein subunit shows preference for 5′ U nucleotides (Noland and Doudna (2013), RNA, 19: 639-648, Nakanishi (2016), WIREs RNA, 7: 637-660). Candidate 19mer duplexes were selected that met the following thermodynamic and physical characteristics: predicted melting temperature of <60° C., no homopolymers of 5 or longer, and at least 4 U or A nucleotides in the seed region (antisense strand positions 2-9). These selected duplexes were further evaluated for specificity (off-target scoring, below).

### Off-Target Scoring

[0413] The specificity of the selected duplexes was evaluated via alignment of both strands to all unspliced RefSeq transcripts (“NM” models for human, mouse, and rat; “NM” and “XM” models for cynomolgus monkey), using the FASTA algorithm with an E value cutoff of 1000. The number of mismatches between each strand and each transcript (per species) was tallied. Duplexes were selected with at least one 8mer seed (positions 2-9) mismatch on each strand to any transcript other than those encoded by the MLH1 gene, since seed mismatches govern specificity of dsRNA activity (Boudreau et al., (2011), Mol. Therapy 19: 2169-2177).

[0414] The sequences, positions in human transcript, conservation in other species and species-specific seed mismatch counts of each duplex are given in Table 4. In some embodiments, the 3′ nucleotide represented by U of the antisense oligonucleotide is any nucleotide (e.g., U, A, G, C, T). Furthermore, duplexes with sequence conservation in cynologous monkey, mouse, and rat are provided in Tables 5-11.

TABLE 4
Exemplary dsRNAs

| SEQ ID | | | SEQ ID | | | | |
|---|---|---|---|---|---|---|---|
| NO | Sense | Antisense | NO | Pos | Cyno | Mouse | Rat |
| 1394 | GAGACCCAGCAACCCACAA | UUGUGGGUUGCUGGGUCUC | 1395 | 4 | Yes | No | No |
| 1396 | CCCAGCAACCCACAGAGUA | UACUCUGUGGGUUGCUGGG | 1397 | 8 | Yes | No | No |
| 1398 | CCAGCAACCCACAGAGUUA | UAACUCUGUGGGUUGCUGG | 1399 | 9 | Yes | No | No |
| 1400 | CAGCAACCCACAGAGUUGA | UCAACUCUGUGGGUUGCUG | 1401 | 10 | Yes | No | No |
| 1402 | CAACCCACAGAGUUGAGAA | UUCUCAACUCUGUGGGUUG | 1403 | 13 | Yes | No | No |
| 1404 | AACCCACAGAGUUGAGAAA | UUUCUCAACUCUGUGGGUU | 1405 | 14 | Yes | No | No |
| 1406 | ACCCACAGAGUUGAGAAAA | UUUUCUCAACUCUGUGGGU | 1407 | 15 | Yes | No | No |
| 1408 | CCCACAGAGUUGAGAAAUA | UAUUUCUCAACUCUGUGGG | 1409 | 16 | Yes | No | No |
| 1410 | CACAGAGUUGAGAAAUUUA | UAAAUUUCUCAACUCUGUG | 1411 | 18 | Yes | No | No |
| 1412 | ACAGAGUUGAGAAAUUUGA | UCAAAUUUCUCAACUCUGU | 1413 | 19 | Yes | No | No |
| 1414 | GAGUUGAGAAAUUUGACUA | UAGUCAAAUUUCUCAACUC | 1415 | 22 | Yes | No | No |
| 1416 | AGUUGAGAAAUUUGACUGA | UCAGUCAAAUUUCUCAACU | 1417 | 23 | Yes | No | No |
| 1418 | GUUGAGAAAUUUGACUGGA | UCCAGUCAAAUUUCUCAAC | 1419 | 24 | Yes | No | No |
| 1420 | GAGAAAUUUGACUGGCAUA | UAUGCCAGUCAAAUUUCUC | 1421 | 27 | Yes | No | No |
| 1422 | AAAUUUGACUGGCAUUCAA | UUGAAUGCCAGUCAAAUUU | 1423 | 30 | Yes | No | No |
| 1424 | UUGACUGGCAUUCAAGCUA | UAGCUUGAAUGCCAGUCAA | 1425 | 34 | Yes | No | No |
| 1426 | ACUGGCAUUCAAGCUGUCA | UGACAGCUUGAAUGCCAGU | 1427 | 37 | No | No | No |
| 1428 | GGCAUUCAAGCUGUCCAAA | UUUGGACAGCUUGAAUGCC | 1429 | 40 | No | No | No |
| 1430 | GCAUUCAAGCUGUCCAAUA | UAUUGGACAGCUUGAAUGC | 1431 | 41 | No | No | No |
| 1432 | CAUUCAAGCUGUCCAAUCA | UGAUUGGACAGCUUGAAUG | 1433 | 42 | No | No | No |
| 1434 | UUCAAGCUGUCCAAUCAAA | UUUGAUUGGACAGCUUGAA | 1435 | 44 | No | No | No |
| 1436 | UCAAGCUGUCCAAUCAAUA | UAUUGAUUGGACAGCUUGA | 1437 | 45 | No | No | No |
| 1438 | AGCUGUCCAAUCAAUAGCA | UGCUAUUGAUUGGACAGCU | 1439 | 48 | No | No | No |
| 1440 | GCUGUCCAAUCAAUAGCUA | UAGCUAUUGAUUGGACAGC | 1441 | 49 | No | No | No |
| 1442 | CUGUCCAAUCAAUAGCUGA | UCAGCUAUUGAUUGGACAG | 1443 | 50 | No | No | No |
| 1444 | UGUCCAAUCAAUAGCUGCA | UGCAGCUAUUGAUUGGACA | 1445 | 51 | No | No | No |
| 1446 | UAGCUGCCGCUGAAGGGUA | UACCCUUCAGCGGCAGCUA | 1447 | 62 | No | No | No |
| 1448 | UGGGGCUGGAUGGCGUAAA | UUUACGCCAUCCAGCCCCA | 1449 | 79 | No | No | No |
| 1450 | UGGAUGGCGUAAGCUACAA | UUGUAGCUUACGCCAUCCA | 1451 | 85 | No | No | No |
| 1452 | GGAUGGCGUAAGCUACAGA | UCUGUAGCUUACGCCAUCC | 1453 | 86 | No | No | No |
| 1454 | AUGGCGUAAGCUACAGCUA | UAGCUGUAGCUUACGCCAU | 1455 | 88 | No | No | No |
| 1456 | GGCGUAAGCUACAGCUGAA | UUCAGCUGUAGCUUACGCC | 1457 | 90 | No | No | No |
| 1458 | GCGUAAGCUACAGCUGAAA | UUUCAGCUGUAGCUUACGC | 1459 | 91 | No | No | No |
| 1460 | CGUAAGCUACAGCUGAAGA | UCUUCAGCUGUAGCUUACG | 1461 | 92 | No | No | No |
| 1462 | AAGCUACAGCUGAAGGAAA | UUUCCUUCAGCUGUAGCUU | 1463 | 95 | No | No | No |
| 1464 | CUACAGCUGAAGGAAGAAA | UUUCUUCCUUCAGCUGUAG | 1465 | 98 | No | No | No |
| 1466 | AGCUGAAGGAAGAACGUGA | UCACGUUCUUCCUUCAGCU | 1467 | 102 | No | No | No |
| 1468 | GCUGAAGGAAGAACGUGAA | UUCACGUUCUUCCUUCAGC | 1469 | 103 | No | No | No |
| 1470 | ACGAGGCACUGAGGUGAUA | UAUCACCUCAGUGCCUCGU | 1471 | 123 | No | No | No |
| 1472 | CGAGGCACUGAGGUGAUUA | UAAUCACCUCAGUGCCUCG | 1473 | 124 | No | No | No |
| 1474 | AGGCACUGAGGUGAUUGGA | UCCAAUCACCUCAGUGCCU | 1475 | 126 | No | No | No |
| 1476 | GGCACUGAGGUGAUUGGCA | UGCCAAUCACCUCAGUGCC | 1477 | 127 | No | No | No |
| 1478 | ACUGAGGUGAUUGGCUGAA | UUCAGCCAAUCACCUCAGU | 1479 | 130 | No | No | No |
| 1480 | CUGAGGUGAUUGGCUGAAA | UUUCAGCCAAUCACCUCAG | 1481 | 131 | No | No | No |
| 1482 | UGAAGGCACUUCCGUUGAA | UUCAACGGAAGUGCCUUCA | 1483 | 145 | Yes | No | No |
| 1484 | AGGCACUUCCGUUGAGCAA | UUGCUCAACGGAAGUGCCU | 1485 | 148 | Yes | No | No |
| 1486 | GGCACUUCCGUUGAGCAUA | UAUGCUCAACGGAAGUGCC | 1487 | 149 | Yes | No | No |
| 1488 | GCACUUCCGUUGAGCAUCA | UGAUGCUCAACGGAAGUGC | 1489 | 150 | Yes | No | No |
| 1490 | CUUCCGUUGAGCAUCUAGA | UCUAGAUGCUCAACGGAAG | 1491 | 153 | Yes | No | No |
| 1492 | UUCCGUUGAGCAUCUAGAA | UUCUAGAUGCUCAACGGAA | 1493 | 154 | Yes | No | No |
| 1494 | CCGUUGAGCAUCUAGACGA | UCGUCUAGAUGCUCAACGG | 1495 | 156 | Yes | No | No |
| 1496 | CGUUGAGCAUCUAGACGUA | UACGUCUAGAUGCUCAACG | 1497 | 157 | Yes | No | No |
| 1498 | AGCAUCUAGACGUUUCCUA | UAGGAAACGUCUAGAUGCU | 1499 | 162 | Yes | No | No |
| 1500 | AUCUAGACGUUUCCUUGGA | UCCAAGGAAACGUCUAGAU | 1501 | 165 | No | No | No |
| 1502 | AGACGUUUCCUUGGCUCUA | UAGAGCCAAGGAAACGUCU | 1503 | 169 | No | No | No |
| 1504 | GACGUUUCCUUGGCUCUUA | UAAGAGCCAAGGAAACGUC | 1505 | 170 | No | No | No |
| 1506 | CUUCUGGCGCCAAAAUGUA | UACAUUUUGGCGCCAGAAG | 1507 | 185 | No | No | No |
| 1508 | UUCUGGCGCCAAAAUGUCA | UGACAUUUUGGCGCCAGAA | 1509 | 186 | No | No | No |
| 1510 | UCUGGCGCCAAAAUGUCGA | UCGACAUUUUGGCGCCAGA | 1511 | 187 | Yes | No | No |
| 1512 | UGGCGCCAAAAUGUCGUUA | UAACGACAUUUUGGCGCCA | 1513 | 189 | Yes | No | No |
| 1514 | GGCGCCAAAAUGUCGUUCA | UGAACGACAUUUUGGCGCC | 1515 | 190 | Yes | No | No |
| 1516 | CGCCAAAAUGUCGUUCGUA | UACGAACGACAUUUUGGCG | 1517 | 192 | Yes | No | No |
| 1518 | CGUUCGUGGCAGGGGUUAA | UUAACCCCUGCCACGAACG | 1519 | 203 | Yes | No | No |
| 1520 | GUUCGUGGCAGGGGUUAUA | UAUAACCCCUGCCACGAAC | 1521 | 204 | Yes | No | No |
| 1522 | UUCGUGGCAGGGGUUAUUA | UAAUAACCCCUGCCACGAA | 1523 | 205 | Yes | No | No |
| 1524 | UCGUGGCAGGGGUUAUUCA | UGAAUAACCCCUGCCACGA | 1525 | 206 | Yes | No | No |
| 1526 | CGUGGCAGGGGUUAUUCGA | UCGAAUAACCCCUGCCACG | 1527 | 207 | Yes | No | No |
| 1528 | GUGGCAGGGGUUAUUCGGA | UCCGAAUAACCCCUGCCAC | 1529 | 208 | Yes | No | No |
| 1530 | UGGACGAGACAGUGGUGAA | UUCACCACUGUCUCGUCCA | 1531 | 230 | Yes | No | No |
| 1532 | GGACGAGACAGUGGUGAAA | UUUCACCACUGUCUCGUCC | 1533 | 231 | Yes | No | No |
| 1534 | GACGAGACAGUGGUGAACA | UGUUCACCACUGUCUCGUC | 1535 | 232 | Yes | No | No |
| 1536 | UAUCCAGCGGCCAGCUAAA | UUUAGCUGGCCGCUGGAUA | 1537 | 270 | Yes | No | No |
| 1538 | AUCCAGCGGCCAGCUAAUA | UAUUAGCUGGCCGCUGGAU | 1539 | 271 | Yes | No | No |
| 1540 | UCCAGCGGCCAGCUAAUGA | UCAUUAGCUGGCCGCUGGA | 1541 | 272 | Yes | No | No |
| 1542 | AGCGGCCAGCUAAUGCUAA | UUAGCAUUAGCUGGCCGCU | 1543 | 275 | Yes | No | No |
| 1544 | GCCAGCUAAUGCUAUCAAA | UUUGAUAGCAUUAGCUGGC | 1545 | 279 | Yes | No | No |
| 1546 | CCAGCUAAUGCUAUCAAAA | UUUUGAUAGCAUUAGCUGG | 1547 | 280 | Yes | No | No |
| 1548 | CAGCUAAUGCUAUCAAAGA | UCUUUGAUAGCAUUAGCUG | 1549 | 281 | Yes | No | No |
| 1550 | AGCUAAUGCUAUCAAAGAA | UUCUUUGAUAGCAUUAGCU | 1551 | 282 | Yes | No | No |
| 1552 | GCUAAUGCUAUCAAAGAGA | UCUCUUUGAUAGCAUUAGC | 1553 | 283 | Yes | No | No |
| 1554 | CUAAUGCUAUCAAAGAGAA | UUCUCUUUGAUAGCAUUAG | 1555 | 284 | Yes | No | No |
| 1556 | UAAUGCUAUCAAAGAGAUA | UAUCUCUUUGAUAGCAUUA | 1557 | 285 | Yes | No | No |
| 1558 | AUGCUAUCAAAGAGAUGAA | UUCAUCUCUUUGAUAGCAU | 1559 | 287 | Yes | Yes | Yes |
| 1560 | GCUAUCAAAGAGAUGAUUA | UAAUCAUCUCUUUGAUAGC | 1561 | 289 | Yes | No | No |
| 1562 | CUAUCAAAGAGAUGAUUGA | UCAAUCAUCUCUUUGAUAG | 1563 | 290 | Yes | No | No |
| 1564 | GAGAUGAUUGAGAACUGUA | UACAGUUCUCAAUCAUCUC | 1565 | 298 | Yes | No | No |
| 1566 | AGAUGAUUGAGAACUGUUA | UAACAGUUCUCAAUCAUCU | 1567 | 299 | Yes | No | No |
| 1568 | GAUGAUUGAGAACUGUUUA | UAAACAGUUCUCAAUCAUC | 1569 | 300 | Yes | No | No |
| 1570 | AUGAUUGAGAACUGUUUAA | UUAAACAGUUCUCAAUCAU | 1571 | 301 | Yes | No | No |
| 1572 | AUUGAGAACUGUUUAGAUA | UAUCUAAACAGUUCUCAAU | 1573 | 304 | Yes | No | No |
| 1574 | AGAACUGUUUAGAUGCAAA | UUUGCAUCUAAACAGUUCU | 1575 | 308 | Yes | No | No |
| 1576 | GAACUGUUUAGAUGCAAAA | UUUUGCAUCUAAACAGUUC | 1577 | 309 | Yes | No | No |
| 1578 | ACUGUUUAGAUGCAAAAUA | UAUUUUGCAUCUAAACAGU | 1579 | 311 | Yes | Yes | Yes |
| 1580 | UGUUUAGAUGCAAAAUCCA | UGGAUUUUGCAUCUAAACA | 1581 | 313 | Yes | No | No |
| 1582 | GUUUAGAUGCAAAAUCCAA | UUGGAUUUUGCAUCUAAAC | 1583 | 314 | Yes | No | No |
| 1584 | UUUAGAUGCAAAAUCCACA | UGUGGAUUUUGCAUCUAAA | 1585 | 315 | Yes | No | No |
| 1586 | UUAGAUGCAAAAUCCACAA | UUGUGGAUUUUGCAUCUAA | 1587 | 316 | Yes | No | No |
| 1588 | AGAUGCAAAAUCCACAAGA | UCUUGUGGAUUUUGCAUCU | 1589 | 318 | Yes | No | No |
| 1590 | GCAAAAUCCACAAGUAUUA | UAAUACUUGUGGAUUUUGC | 1591 | 322 | Yes | No | No |
| 1592 | AAAAUCCACAAGUAUUCAA | UUGAAUACUUGUGGAUUUU | 1593 | 324 | Yes | No | No |
| 1594 | AAUCCACAAGUAUUCAAGA | UCUUGAAUACUUGUGGAUU | 1595 | 326 | Yes | No | No |
| 1596 | UCCACAAGUAUUCAAGUGA | UCACUUGAAUACUUGUGGA | 1597 | 328 | Yes | No | No |
| 1598 | CCACAAGUAUUCAAGUGAA | UUCACUUGAAUACUUGUGG | 1599 | 329 | Yes | No | No |
| 1600 | CACAAGUAUUCAAGUGAUA | UAUCACUUGAAUACUUGUG | 1601 | 330 | Yes | No | No |
| 1602 | ACAAGUAUUCAAGUGAUUA | UAAUCACUUGAAUACUUGU | 1603 | 331 | Yes | No | No |
| 1604 | AAGUAUUCAAGUGAUUGUA | UACAAUCACUUGAAUACUU | 1605 | 333 | Yes | No | No |
| 1606 | AGUAUUCAAGUGAUUGUUA | UAACAAUCACUUGAAUACU | 1607 | 334 | Yes | No | No |
| 1608 | GUAUUCAAGUGAUUGUUAA | UUAACAAUCACUUGAAUAC | 1609 | 335 | Yes | No | No |
| 1610 | UCAAGUGAUUGUUAAAGAA | UUCUUUAACAAUCACUUGA | 1611 | 339 | Yes | No | No |
| 1612 | CAAGUGAUUGUUAAAGAGA | UCUCUUUAACAAUCACUUG | 1613 | 340 | Yes | No | No |
| 1614 | AGUGAUUGUUAAAGAGGGA | UCCCUCUUUAACAAUCACU | 1615 | 342 | Yes | No | No |
| 1616 | GAGGGAGGCCUGAAGUUGA | UCAACUUCAGGCCUCCCUC | 1617 | 355 | Yes | No | No |
| 1618 | AGGGAGGCCUGAAGUUGAA | UUCAACUUCAGGCCUCCCU | 1619 | 356 | Yes | No | No |
| 1620 | GGGAGGCCUGAAGUUGAUA | UAUCAACUUCAGGCCUCCC | 1621 | 357 | Yes | No | No |
| 1622 | GAGGCCUGAAGUUGAUUCA | UGAAUCAACUUCAGGCCUC | 1623 | 359 | Yes | No | No |
| 1624 | CUGAAGUUGAUUCAGAUCA | UGAUCUGAAUCAACUUCAG | 1625 | 364 | Yes | No | No |
| 1626 | GAAGUUGAUUCAGAUCCAA | UUGGAUCUGAAUCAACUUC | 1627 | 366 | Yes | No | No |
| 1628 | AAGUUGAUUCAGAUCCAAA | UUUGGAUCUGAAUCAACUU | 1629 | 367 | Yes | No | No |
| 1630 | AGUUGAUUCAGAUCCAAGA | UCUUGGAUCUGAAUCAACU | 1631 | 368 | Yes | No | No |
| 1632 | GUUGAUUCAGAUCCAAGAA | UUCUUGGAUCUGAAUCAAC | 1633 | 369 | Yes | No | No |
| 1634 | UGAUUCAGAUCCAAGACAA | UUGUCUUGGAUCUGAAUCA | 1635 | 371 | Yes | No | No |
| 1636 | AUUCAGAUCCAAGACAAUA | UAUUGUCUUGGAUCUGAAU | 1637 | 373 | Yes | Yes | Yes |
| 1638 | GCACCGGGAUCAGGAAAGA | UCUUUCCUGAUCCCGGUGC | 1639 | 392 | No | No | No |
| 1640 | CACCGGGAUCAGGAAAGAA | UUCUUUCCUGAUCCCGGUG | 1641 | 393 | No | No | No |
| 1642 | GAUCAGGAAAGAAGAUCUA | UAGAUCUUCUUUCCUGAUC | 1643 | 399 | Yes | No | No |
| 1644 | GAAAGAAGAUCUGGAUAUA | UAUAUCCAGAUCUUCUUUC | 1645 | 405 | Yes | No | No |
| 1646 | AAAGAAGAUCUGGAUAUUA | UAAUAUCCAGAUCUUCUUU | 1647 | 406 | Yes | No | No |
| 1648 | AAGAAGAUCUGGAUAUUGA | UCAAUAUCCAGAUCUUCUU | 1649 | 407 | Yes | No | No |
| 1650 | AGAUCUGGAUAUUGUAUGA | UCAUACAAUAUCCAGAUCU | 1651 | 411 | Yes | No | No |
| 1652 | GAUCUGGAUAUUGUAUGUA | UACAUACAAUAUCCAGAUC | 1653 | 412 | Yes | No | No |
| 1654 | AUCUGGAUAUUGUAUGUGA | UCACAUACAAUAUCCAGAU | 1655 | 413 | Yes | No | No |
| 1656 | UCUGGAUAUUGUAUGUGAA | UUCACAUACAAUAUCCAGA | 1657 | 414 | Yes | No | No |
| 1658 | GGAUAUUGUAUGUGAAAGA | UCUUUCACAUACAAUAUCC | 1659 | 417 | Yes | No | No |
| 1660 | UAUUGUAUGUGAAAGGUUA | UAACCUUUCACAUACAAUA | 1661 | 420 | Yes | No | No |
| 1662 | AUUGUAUGUGAAAGGUUCA | UGAACCUUUCACAUACAAU | 1663 | 421 | Yes | No | No |
| 1664 | UUGUAUGUGAAAGGUUCAA | UUGAACCUUUCACAUACAA | 1665 | 422 | Yes | No | No |
| 1666 | UGUAUGUGAAAGGUUCACA | UGUGAACCUUUCACAUACA | 1667 | 423 | Yes | No | No |
| 1668 | GUAUGUGAAAGGUUCACUA | UAGUGAACCUUUCACAUAC | 1669 | 424 | Yes | No | No |
| 1670 | AUGUGAAAGGUUCACUACA | UGUAGUGAACCUUUCACAU | 1671 | 426 | Yes | No | No |
| 1672 | UGUGAAAGGUUCACUACUA | UAGUAGUGAACCUUUCACA | 1673 | 427 | No | No | No |
| 1674 | GUGAAAGGUUCACUACUAA | UUAGUAGUGAACCUUUCAC | 1675 | 428 | No | No | No |
| 1676 | UGAAAGGUUCACUACUAGA | UCUAGUAGUGAACCUUUCA | 1677 | 429 | No | No | No |
| 1678 | GAAAGGUUCACUACUAGUA | UACUAGUAGUGAACCUUUC | 1679 | 430 | No | No | No |
| 1680 | AAGGUUCACUACUAGUAAA | UUUACUAGUAGUGAACCUU | 1681 | 432 | No | No | No |
| 1682 | AGGUUCACUACUAGUAAAA | UUUUACUAGUAGUGAACCU | 1683 | 433 | No | No | No |
| 1684 | GUUCACUACUAGUAAACUA | UAGUUUACUAGUAGUGAAC | 1685 | 435 | No | No | No |
| 1686 | UUCACUACUAGUAAACUGA | UCAGUUUACUAGUAGUGAA | 1687 | 436 | No | No | No |
| 1688 | UCACUACUAGUAAACUGCA | UGCAGUUUACUAGUAGUGA | 1689 | 437 | No | No | No |
| 1690 | CUACUAGUAAACUGCAGUA | UACUGCAGUUUACUAGUAG | 1691 | 440 | No | No | No |
| 1692 | UAGUAAACUGCAGUCCUUA | UAAGGACUGCAGUUUACUA | 1693 | 444 | No | No | No |
| 1694 | AGUAAACUGCAGUCCUUUA | UAAAGGACUGCAGUUUACU | 1695 | 445 | Yes | No | No |
| 1696 | GUAAACUGCAGUCCUUUGA | UCAAAGGACUGCAGUUUAC | 1697 | 446 | Yes | No | No |
| 1698 | UAAACUGCAGUCCUUUGAA | UUCAAAGGACUGCAGUUUA | 1699 | 447 | Yes | No | No |
| 1700 | AAACUGCAGUCCUUUGAGA | UCUCAAAGGACUGCAGUUU | 1701 | 448 | Yes | No | No |
| 1702 | UGCAGUCCUUUGAGGAUUA | UAAUCCUCAAAGGACUGCA | 1703 | 452 | Yes | No | No |
| 1704 | GCAGUCCUUUGAGGAUUUA | UAAAUCCUCAAAGGACUGC | 1705 | 453 | Yes | No | No |
| 1706 | CAGUCCUUUGAGGAUUUAA | UUAAAUCCUCAAAGGACUG | 1707 | 454 | Yes | No | No |
| 1708 | AGUCCUUUGAGGAUUUAGA | UCUAAAUCCUCAAAGGACU | 1709 | 455 | Yes | No | No |
| 1710 | GUCCUUUGAGGAUUUAGCA | UGCUAAAUCCUCAAAGGAC | 1711 | 456 | Yes | No | No |
| 1712 | UCCUUUGAGGAUUUAGCCA | UGGCUAAAUCCUCAAAGGA | 1713 | 457 | Yes | No | No |
| 1714 | CUUUGAGGAUUUAGCCAGA | UCUGGCUAAAUCCUCAAAG | 1715 | 459 | Yes | No | No |
| 1716 | UUUGAGGAUUUAGCCAGUA | UACUGGCUAAAUCCUCAAA | 1717 | 460 | Yes | Yes | No |
| 1718 | UUGAGGAUUUAGCCAGUAA | UUACUGGCUAAAUCCUCAA | 1719 | 461 | Yes | Yes | No |
| 1720 | UGAGGAUUUAGCCAGUAUA | UAUACUGGCUAAAUCCUCA | 1721 | 462 | Yes | Yes | No |
| 1722 | GAGGAUUUAGCCAGUAUUA | UAAUACUGGCUAAAUCCUC | 1723 | 463 | Yes | Yes | No |
| 1724 | AGGAUUUAGCCAGUAUUUA | UAAAUACUGGCUAAAUCCU | 1725 | 464 | Yes | Yes | No |
| 1726 | GGAUUUAGCCAGUAUUUCA | UGAAAUACUGGCUAAAUCC | 1727 | 465 | Yes | Yes | No |
| 1728 | GAUUUAGCCAGUAUUUCUA | UAGAAAUACUGGCUAAAUC | 1729 | 466 | Yes | Yes | No |
| 1730 | UUAGCCAGUAUUUCUACCA | UGGUAGAAAUACUGGCUAA | 1731 | 469 | Yes | Yes | No |
| 1732 | UAGCCAGUAUUUCUACCUA | UAGGUAGAAAUACUGGCUA | 1733 | 470 | Yes | Yes | No |
| 1734 | AGCCAGUAUUUCUACCUAA | UUAGGUAGAAAUACUGGCU | 1735 | 471 | Yes | Yes | No |
| 1736 | GCCAGUAUUUCUACCUAUA | UAUAGGUAGAAAUACUGGC | 1737 | 472 | Yes | Yes | No |
| 1738 | CAGUAUUUCUACCUAUGGA | UCCAUAGGUAGAAAUACUG | 1739 | 474 | Yes | Yes | No |
| 1740 | GUAUUUCUACCUAUGGCUA | UAGCCAUAGGUAGAAAUAC | 1741 | 476 | Yes | Yes | No |
| 1742 | UAUUUCUACCUAUGGCUUA | UAAGCCAUAGGUAGAAAUA | 1743 | 477 | Yes | Yes | No |
| 1744 | AUUUCUACCUAUGGCUUUA | UAAAGCCAUAGGUAGAAAU | 1745 | 478 | Yes | Yes | No |
| 1746 | UUUCUACCUAUGGCUUUCA | UGAAAGCCAUAGGUAGAAA | 1747 | 479 | Yes | Yes | No |
| 1748 | UCUACCUAUGGCUUUCGAA | UUCGAAAGCCAUAGGUAGA | 1749 | 481 | Yes | No | No |
| 1750 | CUACCUAUGGCUUUCGAGA | UCUCGAAAGCCAUAGGUAG | 1751 | 482 | Yes | No | No |
| 1752 | UACCUAUGGCUUUCGAGGA | UCCUCGAAAGCCAUAGGUA | 1753 | 483 | Yes | No | No |
| 1754 | ACCUAUGGCUUUCGAGGUA | UACCUCGAAAGCCAUAGGU | 1755 | 484 | Yes | No | No |
| 1756 | GCUUUCGAGGUGAGGCUUA | UAAGCCUCACCUCGAAAGC | 1757 | 491 | Yes | No | No |
| 1758 | UUUCGAGGUGAGGCUUUGA | UCAAAGCCUCACCUCGAAA | 1759 | 493 | Yes | No | No |
| 1760 | GAGGUGAGGCUUUGGCCAA | UUGGCCAAAGCCUCACCUC | 1761 | 497 | Yes | No | No |
| 1762 | GCUUUGGCCAGCAUAAGCA | UGCUUAUGCUGGCCAAAGC | 1763 | 505 | Yes | No | No |
| 1764 | AGCAUAAGCCAUGUGGCUA | UAGCCACAUGGCUUAUGCU | 1765 | 514 | Yes | No | No |
| 1766 | AGCCAUGUGGCUCAUGUUA | UAACAUGAGCCACAUGGCU | 1767 | 520 | Yes | No | No |
| 1768 | CAUGUGGCUCAUGUUACUA | UAGUAACAUGAGCCACAUG | 1769 | 523 | Yes | No | No |
| 1770 | AUGUGGCUCAUGUUACUAA | UUAGUAACAUGAGCCACAU | 1771 | 524 | Yes | No | No |
| 1772 | UGUGGCUCAUGUUACUAUA | UAUAGUAACAUGAGCCACA | 1773 | 525 | Yes | No | No |
| 1774 | GUGGCUCAUGUUACUAUUA | UAAUAGUAACAUGAGCCAC | 1775 | 526 | Yes | No | No |
| 1776 | UGGCUCAUGUUACUAUUAA | UUAAUAGUAACAUGAGCCA | 1777 | 527 | Yes | No | No |
| 1778 | GGCUCAUGUUACUAUUACA | UGUAAUAGUAACAUGAGCC | 1779 | 528 | Yes | No | No |
| 1780 | CUCAUGUUACUAUUACAAA | UUUGUAAUAGUAACAUGAG | 1781 | 530 | Yes | No | No |
| 1782 | UCAUGUUACUAUUACAACA | UGUUGUAAUAGUAACAUGA | 1783 | 531 | Yes | No | No |
| 1784 | CAUGUUACUAUUACAACGA | UCGUUGUAAUAGUAACAUG | 1785 | 532 | No | No | No |
| 1786 | AUGUUACUAUUACAACGAA | UUCGUUGUAAUAGUAACAU | 1787 | 533 | No | No | No |
| 1788 | UGUUACUAUUACAACGAAA | UUUCGUUGUAAUAGUAACA | 1789 | 534 | No | No | No |
| 1790 | UACUAUUACAACGAAAACA | UGUUUUCGUUGUAAUAGUA | 1791 | 537 | No | No | No |
| 1792 | ACUAUUACAACGAAAACAA | UUGUUUUCGUUGUAAUAGU | 1793 | 538 | No | No | No |
| 1794 | AUUACAACGAAAACAGCUA | UAGCUGUUUUCGUUGUAAU | 1795 | 541 | No | No | No |
| 1796 | UACAACGAAAACAGCUGAA | UUCAGCUGUUUUCGUUGUA | 1797 | 543 | No | No | No |
| 1798 | ACAACGAAAACAGCUGAUA | UAUCAGCUGUUUUCGUUGU | 1799 | 544 | No | No | No |
| 1800 | CAACGAAAACAGCUGAUGA | UCAUCAGCUGUUUUCGUUG | 1801 | 545 | No | No | No |
| 1802 | ACGAAAACAGCUGAUGGAA | UUCCAUCAGCUGUUUUCGU | 1803 | 547 | No | No | No |
| 1804 | CGAAAACAGCUGAUGGAAA | UUUCCAUCAGCUGUUUUCG | 1805 | 548 | No | No | No |
| 1806 | AAACAGCUGAUGGAAAGUA | UACUUUCCAUCAGCUGUUU | 1807 | 551 | Yes | No | No |
| 1808 | ACAGCUGAUGGAAAGUGUA | UACACUUUCCAUCAGCUGU | 1809 | 553 | Yes | No | No |
| 1810 | CAGCUGAUGGAAAGUGUGA | UCACACUUUCCAUCAGCUG | 1811 | 554 | Yes | No | No |
| 1812 | AGCUGAUGGAAAGUGUGCA | UGCACACUUUCCAUCAGCU | 1813 | 555 | Yes | No | No |
| 1814 | CUGAUGGAAAGUGUGCAUA | UAUGCACACUUUCCAUCAG | 1815 | 557 | Yes | No | No |
| 1816 | UGAUGGAAAGUGUGCAUAA | UUAUGCACACUUUCCAUCA | 1817 | 558 | Yes | No | No |
| 1818 | AUGGAAAGUGUGCAUACAA | UUGUAUGCACACUUUCCAU | 1819 | 560 | Yes | No | No |
| 1820 | UGGAAAGUGUGCAUACAGA | UCUGUAUGCACACUUUCCA | 1821 | 561 | Yes | No | No |
| 1822 | GGAAAGUGUGCAUACAGAA | UUCUGUAUGCACACUUUCC | 1823 | 562 | Yes | No | No |
| 1824 | GAAAGUGUGCAUACAGAGA | UCUCUGUAUGCACACUUUC | 1825 | 563 | Yes | No | No |
| 1826 | AAAGUGUGCAUACAGAGCA | UGCUCUGUAUGCACACUUU | 1827 | 564 | Yes | No | No |
| 1828 | AAGUGUGCAUACAGAGCAA | UUGCUCUGUAUGCACACUU | 1829 | 565 | Yes | No | No |
| 1830 | GUGUGCAUACAGAGCAAGA | UCUUGCUCUGUAUGCACAC | 1831 | 567 | Yes | No | No |
| 1832 | GCAUACAGAGCAAGUUACA | UGUAACUUGCUCUGUAUGC | 1833 | 571 | Yes | No | Yes |
| 1834 | CAUACAGAGCAAGUUACUA | UAGUAACUUGCUCUGUAUG | 1835 | 572 | Yes | No | Yes |
| 1836 | AUACAGAGCAAGUUACUCA | UGAGUAACUUGCUCUGUAU | 1837 | 573 | Yes | No | Yes |
| 1838 | UACAGAGCAAGUUACUCAA | UUGAGUAACUUGCUCUGUA | 1839 | 574 | Yes | Yes | Yes |
| 1840 | CAGAGCAAGUUACUCAGAA | UUCUGAGUAACUUGCUCUG | 1841 | 576 | Yes | Yes | Yes |
| 1842 | GAGCAAGUUACUCAGAUGA | UCAUCUGAGUAACUUGCUC | 1843 | 578 | Yes | Yes | Yes |
| 1844 | CAAGUUACUCAGAUGGAAA | UUUCCAUCUGAGUAACUUG | 1845 | 581 | Yes | Yes | Yes |
| 1846 | AAGUUACUCAGAUGGAAAA | UUUUCCAUCUGAGUAACUU | 1847 | 582 | Yes | Yes | Yes |
| 1848 | ACUGAAAGCCCCUCCUAAA | UUUAGGAGGGGCUUUCAGU | 1849 | 600 | No | No | No |
| 1850 | CUGAAAGCCCCUCCUAAAA | UUUUAGGAGGGGCUUUCAG | 1851 | 601 | No | No | No |
| 1852 | GAAAGCCCCUCCUAAACCA | UGGUUUAGGAGGGGCUUUC | 1853 | 603 | No | No | No |
| 1854 | AAAGCCCCUCCUAAACCAA | UUGGUUUAGGAGGGGCUUU | 1855 | 604 | No | No | No |
| 1856 | AAGCCCCUCCUAAACCAUA | UAUGGUUUAGGAGGGGCUU | 1857 | 605 | No | No | No |
| 1858 | GCCCCUCCUAAACCAUGUA | UACAUGGUUUAGGAGGGGC | 1859 | 607 | No | No | No |
| 1860 | CCCCUCCUAAACCAUGUGA | UCACAUGGUUUAGGAGGGG | 1861 | 608 | No | No | No |
| 1862 | CCUCCUAAACCAUGUGCUA | UAGCACAUGGUUUAGGAGG | 1863 | 610 | Yes | No | No |
| 1864 | CUCCUAAACCAUGUGCUGA | UCAGCACAUGGUUUAGGAG | 1865 | 611 | Yes | No | No |
| 1866 | AAACCAUGUGCUGGCAAUA | UAUUGCCAGCACAUGGUUU | 1867 | 616 | Yes | No | No |
| 1868 | AACCAUGUGCUGGCAAUCA | UGAUUGCCAGCACAUGGUU | 1869 | 617 | Yes | No | No |
| 1870 | ACCAUGUGCUGGCAAUCAA | UUGAUUGCCAGCACAUGGU | 1871 | 618 | Yes | No | No |
| 1872 | CAUGUGCUGGCAAUCAAGA | UCUUGAUUGCCAGCACAUG | 1873 | 620 | Yes | No | No |
| 1874 | AUGUGCUGGCAAUCAAGGA | UCCUUGAUUGCCAGCACAU | 1875 | 621 | Yes | No | No |
| 1876 | UGUGCUGGCAAUCAAGGGA | UCCCUUGAUUGCCAGCACA | 1877 | 622 | Yes | No | No |
| 1878 | CAAUCAAGGGACCCAGAUA | UAUCUGGGUCCCUUGAUUG | 1879 | 630 | Yes | No | No |
| 1880 | CAAGGGACCCAGAUCACGA | UCGUGAUCUGGGUCCCUUG | 1881 | 634 | Yes | No | No |
| 1882 | AUCACGGUGGAGGACCUUA | UAAGGUCCUCCACCGUGAU | 1883 | 646 | Yes | No | No |
| 1884 | UCACGGUGGAGGACCUUUA | UAAAGGUCCUCCACCGUGA | 1885 | 647 | Yes | No | No |
| 1886 | ACAUAGCCACGAGGAGAAA | UUUCUCCUCGUGGCUAUGU | 1887 | 671 | Yes | No | No |
| 1888 | CAUAGCCACGAGGAGAAAA | UUUUCUCCUCGUGGCUAUG | 1889 | 672 | Yes | No | No |
| 1890 | AGCCACGAGGAGAAAAGCA | UGCUUUUCUCCUCGUGGCU | 1891 | 675 | Yes | No | No |
| 1892 | GCCACGAGGAGAAAAGCUA | UAGCUUUUCUCCUCGUGGC | 1893 | 676 | Yes | No | No |
| 1894 | CCACGAGGAGAAAAGCUUA | UAAGCUUUUCUCCUCGUGG | 1895 | 677 | Yes | No | No |
| 1896 | CGAGGAGAAAAGCUUUAAA | UUUAAAGCUUUUCUCCUCG | 1897 | 680 | Yes | No | No |
| 1898 | UGGGAAAAUUUUGGAAGUA | UACUUCCAAAAUUUUCCCA | 1899 | 717 | No | No | No |
| 1900 | GGAAAAUUUUGGAAGUUGA | UCAACUUCCAAAAUUUUCC | 1901 | 719 | No | No | No |
| 1902 | AAAUUUUGGAAGUUGUUGA | UCAACAACUUCCAAAAUUU | 1903 | 722 | No | Yes | No |
| 1904 | AAUUUUGGAAGUUGUUGGA | UCCAACAACUUCCAAAAUU | 1905 | 723 | No | Yes | No |
| 1906 | AUUUUGGAAGUUGUUGGCA | UGCCAACAACUUCCAAAAU | 1907 | 724 | No | Yes | Yes |
| 1908 | GAAGUUGUUGGCAGGUAUA | UAUACCUGCCAACAACUUC | 1909 | 730 | No | Yes | No |
| 1910 | AGUUGUUGGCAGGUAUUCA | UGAAUACCUGCCAACAACU | 1911 | 732 | No | Yes | No |
| 1912 | GGCAGGUAUUCAGUACACA | UGUGUACUGAAUACCUGCC | 1913 | 739 | No | No | No |
| 1914 | GCAGGUAUUCAGUACACAA | UUGUGUACUGAAUACCUGC | 1915 | 740 | No | No | No |
| 1916 | CAGGUAUUCAGUACACAAA | UUUGUGUACUGAAUACCUG | 1917 | 741 | No | No | No |
| 1918 | AGGUAUUCAGUACACAAUA | UAUUGUGUACUGAAUACCU | 1919 | 742 | No | No | No |
| 1920 | GGUAUUCAGUACACAAUGA | UCAUUGUGUACUGAAUACC | 1921 | 743 | No | No | No |
| 1922 | GUAUUCAGUACACAAUGCA | UGCAUUGUGUACUGAAUAC | 1923 | 744 | No | No | No |
| 1924 | UUCAGUACACAAUGCAGGA | UCCUGCAUUGUGUACUGAA | 1925 | 747 | No | No | No |
| 1926 | UACACAAUGCAGGCAUUAA | UUAAUGCCUGCAUUGUGUA | 1927 | 752 | Yes | No | No |
| 1928 | CACAAUGCAGGCAUUAGUA | UACUAAUGCCUGCAUUGUG | 1929 | 754 | Yes | No | No |
| 1930 | ACAAUGCAGGCAUUAGUUA | UAACUAAUGCCUGCAUUGU | 1931 | 755 | Yes | No | No |
| 1932 | CAAUGCAGGCAUUAGUUUA | UAAACUAAUGCCUGCAUUG | 1933 | 756 | Yes | No | No |
| 1934 | AAUGCAGGCAUUAGUUUCA | UGAAACUAAUGCCUGCAUU | 1935 | 757 | Yes | No | No |
| 1936 | UGCAGGCAUUAGUUUCUCA | UGAGAAACUAAUGCCUGCA | 1937 | 759 | Yes | No | No |
| 1938 | GCAGGCAUUAGUUUCUCAA | UUGAGAAACUAAUGCCUGC | 1939 | 760 | Yes | No | No |
| 1940 | GCAUUAGUUUCUCAGUUAA | UUAACUGAGAAACUAAUGC | 1941 | 764 | Yes | Yes | No |
| 1942 | AAAACAAGGAGAGACAGUA | UACUGUCUCUCCUUGUUUU | 1943 | 783 | No | No | No |
| 1944 | AACAAGGAGAGACAGUAGA | UCUACUGUCUCUCCUUGUU | 1945 | 785 | No | No | No |
| 1946 | ACAAGGAGAGACAGUAGCA | UGCUACUGUCUCUCCUUGU | 1947 | 786 | No | No | No |
| 1948 | CAAGGAGAGACAGUAGCUA | UAGCUACUGUCUCUCCUUG | 1949 | 787 | No | No | No |
| 1950 | GAGACAGUAGCUGAUGUUA | UAACAUCAGCUACUGUCUC | 1951 | 793 | Yes | No | No |
| 1952 | AGACAGUAGCUGAUGUUAA | UUAACAUCAGCUACUGUCU | 1953 | 794 | Yes | No | No |
| 1954 | GACAGUAGCUGAUGUUAGA | UCUAACAUCAGCUACUGUC | 1955 | 795 | Yes | No | No |
| 1956 | ACAGUAGCUGAUGUUAGGA | UCCUAACAUCAGCUACUGU | 1957 | 796 | Yes | No | No |
| 1958 | CAGUAGCUGAUGUUAGGAA | UUCCUAACAUCAGCUACUG | 1959 | 797 | Yes | No | No |
| 1960 | AGUAGCUGAUGUUAGGACA | UGUCCUAACAUCAGCUACU | 1961 | 798 | Yes | No | No |
| 1962 | GUAGCUGAUGUUAGGACAA | UUGUCCUAACAUCAGCUAC | 1963 | 799 | Yes | No | No |
| 1964 | UAGCUGAUGUUAGGACACA | UGUGUCCUAACAUCAGCUA | 1965 | 800 | Yes | No | No |
| 1966 | AGCUGAUGUUAGGACACUA | UAGUGUCCUAACAUCAGCU | 1967 | 801 | Yes | No | No |
| 1968 | GCUGAUGUUAGGACACUAA | UUAGUGUCCUAACAUCAGC | 1969 | 802 | Yes | No | No |
| 1970 | UGAUGUUAGGACACUACCA | UGGUAGUGUCCUAACAUCA | 1971 | 804 | Yes | No | No |
| 1972 | GUUAGGACACUACCCAAUA | UAUUGGGUAGUGUCCUAAC | 1973 | 808 | Yes | No | No |
| 1974 | UUAGGACACUACCCAAUGA | UCAUUGGGUAGUGUCCUAA | 1975 | 809 | Yes | No | No |
| 1976 | GACACUACCCAAUGCCUCA | UGAGGCAUUGGGUAGUGUC | 1977 | 813 | Yes | No | No |
| 1978 | ACACUACCCAAUGCCUCAA | UUGAGGCAUUGGGUAGUGU | 1979 | 814 | Yes | No | No |
| 1980 | CACUACCCAAUGCCUCAAA | UUUGAGGCAUUGGGUAGUG | 1981 | 815 | Yes | No | No |
| 1982 | UGCCUCAACCGUGGACAAA | UUUGUCCACGGUUGAGGCA | 1983 | 825 | No | No | No |
| 1984 | GCCUCAACCGUGGACAAUA | UAUUGUCCACGGUUGAGGC | 1985 | 826 | No | No | No |
| 1986 | CUCAACCGUGGACAAUAUA | UAUAUUGUCCACGGUUGAG | 1987 | 828 | No | No | No |
| 1988 | UCAACCGUGGACAAUAUUA | UAAUAUUGUCCACGGUUGA | 1989 | 829 | No | No | No |
| 1990 | CAACCGUGGACAAUAUUCA | UGAAUAUUGUCCACGGUUG | 1991 | 830 | No | No | No |
| 1992 | AACCGUGGACAAUAUUCGA | UCGAAUAUUGUCCACGGUU | 1993 | 831 | No | No | No |
| 1994 | ACCGUGGACAAUAUUCGCA | UGCGAAUAUUGUCCACGGU | 1995 | 832 | No | No | No |
| 1996 | CCGUGGACAAUAUUCGCUA | UAGCGAAUAUUGUCCACGG | 1997 | 833 | No | No | No |
| 1998 | ACAAUAUUCGCUCCAUCUA | UAGAUGGAGCGAAUAUUGU | 1999 | 839 | Yes | No | No |
| 2000 | CAAUAUUCGCUCCAUCUUA | UAAGAUGGAGCGAAUAUUG | 2001 | 840 | Yes | No | No |
| 2002 | AAUAUUCGCUCCAUCUUUA | UAAAGAUGGAGCGAAUAUU | 2003 | 841 | Yes | No | No |
| 2004 | UAUUCGCUCCAUCUUUGGA | UCCAAAGAUGGAGCGAAUA | 2005 | 843 | Yes | No | No |
| 2006 | AUUCGCUCCAUCUUUGGAA | UUCCAAAGAUGGAGCGAAU | 2007 | 844 | Yes | Yes | Yes |
| 2008 | UUCGCUCCAUCUUUGGAAA | UUUCCAAAGAUGGAGCGAA | 2009 | 845 | Yes | Yes | Yes |
| 2010 | UCGCUCCAUCUUUGGAAAA | UUUUCCAAAGAUGGAGCGA | 2011 | 846 | Yes | Yes | Yes |
| 2012 | CGCUCCAUCUUUGGAAAUA | UAUUUCCAAAGAUGGAGCG | 2013 | 847 | Yes | Yes | Yes |
| 2014 | UCCAUCUUUGGAAAUGCUA | UAGCAUUUCCAAAGAUGGA | 2015 | 850 | Yes | No | Yes |
| 2016 | AUCUUUGGAAAUGCUGUUA | UAACAGCAUUUCCAAAGAU | 2017 | 853 | Yes | No | Yes |
| 2018 | UCUUUGGAAAUGCUGUUAA | UUAACAGCAUUUCCAAAGA | 2019 | 854 | Yes | No | Yes |
| 2020 | CUUUGGAAAUGCUGUUAGA | UCUAACAGCAUUUCCAAAG | 2021 | 855 | Yes | No | Yes |
| 2022 | UUGGAAAUGCUGUUAGUCA | UGACUAACAGCAUUUCCAA | 2023 | 857 | Yes | No | Yes |
| 2024 | UGGAAAUGCUGUUAGUCGA | UCGACUAACAGCAUUUCCA | 2025 | 858 | Yes | No | Yes |
| 2026 | GGAAAUGCUGUUAGUCGAA | UUCGACUAACAGCAUUUCC | 2027 | 859 | Yes | No | Yes |
| 2028 | GAAAUGCUGUUAGUCGAGA | UCUCGACUAACAGCAUUUC | 2029 | 860 | Yes | No | Yes |
| 2030 | AAAUGCUGUUAGUCGAGAA | UUCUCGACUAACAGCAUUU | 2031 | 861 | Yes | No | Yes |
| 2032 | AAUGCUGUUAGUCGAGAAA | UUUCUCGACUAACAGCAUU | 2033 | 862 | Yes | No | Yes |
| 2034 | AUGCUGUUAGUCGAGAACA | UGUUCUCGACUAACAGCAU | 2035 | 863 | Yes | No | Yes |
| 2036 | UGCUGUUAGUCGAGAACUA | UAGUUCUCGACUAACAGCA | 2037 | 864 | Yes | No | Yes |
| 2038 | GCUGUUAGUCGAGAACUGA | UCAGUUCUCGACUAACAGC | 2039 | 865 | Yes | No | Yes |
| 2040 | UGUUAGUCGAGAACUGAUA | UAUCAGUUCUCGACUAACA | 2041 | 867 | Yes | No | Yes |
| 2042 | GUUAGUCGAGAACUGAUAA | UUAUCAGUUCUCGACUAAC | 2043 | 868 | Yes | Yes | No |
| 2044 | UUAGUCGAGAACUGAUAGA | UCUAUCAGUUCUCGACUAA | 2045 | 869 | Yes | Yes | No |
| 2046 | UAGUCGAGAACUGAUAGAA | UUCUAUCAGUUCUCGACUA | 2047 | 870 | Yes | Yes | No |
| 2048 | AGUCGAGAACUGAUAGAAA | UUUCUAUCAGUUCUCGACU | 2049 | 871 | Yes | Yes | No |
| 2050 | GUCGAGAACUGAUAGAAAA | UUUUCUAUCAGUUCUCGAC | 2051 | 872 | Yes | No | No |
| 2052 | UCGAGAACUGAUAGAAAUA | UAUUUCUAUCAGUUCUCGA | 2053 | 873 | Yes | No | No |
| 2054 | CGAGAACUGAUAGAAAUUA | UAAUUUCUAUCAGUUCUCG | 2055 | 874 | Yes | No | No |
| 2056 | AGAACUGAUAGAAAUUGGA | UCCAAUUUCUAUCAGUUCU | 2057 | 876 | Yes | No | No |
| 2058 | GAACUGAUAGAAAUUGGAA | UUCCAAUUUCUAUCAGUUC | 2059 | 877 | Yes | No | No |
| 2060 | ACUGAUAGAAAUUGGAUGA | UCAUCCAAUUUCUAUCAGU | 2061 | 879 | Yes | No | No |
| 2062 | UGAUAGAAAUUGGAUGUGA | UCACAUCCAAUUUCUAUCA | 2063 | 881 | Yes | No | No |
| 2064 | GAUAGAAAUUGGAUGUGAA | UUCACAUCCAAUUUCUAUC | 2065 | 882 | Yes | No | No |
| 2066 | UAGAAAUUGGAUGUGAGGA | UCCUCACAUCCAAUUUCUA | 2067 | 884 | Yes | No | No |
| 2068 | AAUUGGAUGUGAGGAUAAA | UUUAUCCUCACAUCCAAUU | 2069 | 888 | Yes | No | No |
| 2070 | AUUGGAUGUGAGGAUAAAA | UUUUAUCCUCACAUCCAAU | 2071 | 889 | Yes | No | No |
| 2072 | UGGAUGUGAGGAUAAAACA | UGUUUUAUCCUCACAUCCA | 2073 | 891 | Yes | No | No |
| 2074 | GAUGUGAGGAUAAAACCCA | UGGGUUUUAUCCUCACAUC | 2075 | 893 | Yes | No | No |
| 2076 | AUGUGAGGAUAAAACCCUA | UAGGGUUUUAUCCUCACAU | 2077 | 894 | Yes | No | No |
| 2078 | UGUGAGGAUAAAACCCUAA | UUAGGGUUUUAUCCUCACA | 2079 | 895 | Yes | Yes | Yes |
| 2080 | GUGAGGAUAAAACCCUAGA | UCUAGGGUUUUAUCCUCAC | 2081 | 896 | Yes | Yes | Yes |
| 2082 | GGAUAAAACCCUAGCCUUA | UAAGGCUAGGGUUUUAUCC | 2083 | 900 | Yes | No | No |
| 2084 | UAAAACCCUAGCCUUCAAA | UUUGAAGGCUAGGGUUUUA | 2085 | 903 | Yes | No | No |
| 2086 | AACCCUAGCCUUCAAAAUA | UAUUUUGAAGGCUAGGGUU | 2087 | 906 | Yes | No | No |
| 2088 | ACCCUAGCCUUCAAAAUGA | UCAUUUUGAAGGCUAGGGU | 2089 | 907 | Yes | No | No |
| 2090 | CUAGCCUUCAAAAUGAAUA | UAUUCAUUUUGAAGGCUAG | 2091 | 910 | Yes | No | No |
| 2092 | AGCCUUCAAAAUGAAUGGA | UCCAUUCAUUUUGAAGGCU | 2093 | 912 | Yes | No | No |
| 2094 | UCAAAAUGAAUGGUUACAA | UUGUAACCAUUCAUUUUGA | 2095 | 917 | No | No | No |
| 2096 | CAAAAUGAAUGGUUACAUA | UAUGUAACCAUUCAUUUUG | 2097 | 918 | No | No | No |
| 2098 | AAAUGAAUGGUUACAUAUA | UAUAUGUAACCAUUCAUUU | 2099 | 920 | No | No | No |
| 2100 | AAUGAAUGGUUACAUAUCA | UGAUAUGUAACCAUUCAUU | 2101 | 921 | No | No | No |
| 2102 | AUGAAUGGUUACAUAUCCA | UGGAUAUGUAACCAUUCAU | 2103 | 922 | No | No | No |
| 2104 | UGAAUGGUUACAUAUCCAA | UUGGAUAUGUAACCAUUCA | 2105 | 923 | No | No | No |
| 2106 | GAAUGGUUACAUAUCCAAA | UUUGGAUAUGUAACCAUUC | 2107 | 924 | No | No | No |
| 2108 | GGUUACAUAUCCAAUGCAA | UUGCAUUGGAUAUGUAACC | 2109 | 928 | No | No | No |
| 2110 | UUACAUAUCCAAUGCAAAA | UUUUGCAUUGGAUAUGUAA | 2111 | 930 | No | No | No |
| 2112 | UACAUAUCCAAUGCAAACA | UGUUUGCAUUGGAUAUGUA | 2113 | 931 | No | No | No |
| 2114 | UAUCCAAUGCAAACUACUA | UAGUAGUUUGCAUUGGAUA | 2115 | 935 | Yes | No | No |
| 2116 | AUCCAAUGCAAACUACUCA | UGAGUAGUUUGCAUUGGAU | 2117 | 936 | Yes | No | No |
| 2118 | UCCAAUGCAAACUACUCAA | UUGAGUAGUUUGCAUUGGA | 2119 | 937 | Yes | No | No |
| 2120 | CCAAUGCAAACUACUCAGA | UCUGAGUAGUUUGCAUUGG | 2121 | 938 | Yes | No | No |
| 2122 | CAAUGCAAACUACUCAGUA | UACUGAGUAGUUUGCAUUG | 2123 | 939 | Yes | No | No |
| 2124 | AUGCAAACUACUCAGUGAA | UUCACUGAGUAGUUUGCAU | 2125 | 941 | Yes | No | Yes |
| 2126 | CAAACUACUCAGUGAAGAA | UUCUUCACUGAGUAGUUUG | 2127 | 944 | Yes | No | Yes |
| 2128 | AAACUACUCAGUGAAGAAA | UUUCUUCACUGAGUAGUUU | 2129 | 945 | Yes | No | Yes |
| 2130 | AACUACUCAGUGAAGAAGA | UCUUCUUCACUGAGUAGUU | 2131 | 946 | No | No | Yes |
| 2132 | ACUCAGUGAAGAAGUGCAA | UUGCACUUCUUCACUGAGU | 2133 | 950 | No | No | Yes |
| 2134 | UCAGUGAAGAAGUGCAUCA | UGAUGCACUUCUUCACUGA | 2135 | 952 | No | No | No |
| 2136 | CAGUGAAGAAGUGCAUCUA | UAGAUGCACUUCUUCACUG | 2137 | 953 | No | No | No |
| 2138 | GUGAAGAAGUGCAUCUUCA | UGAAGAUGCACUUCUUCAC | 2139 | 955 | No | No | No |
| 2140 | UGAAGAAGUGCAUCUUCUA | UAGAAGAUGCACUUCUUCA | 2141 | 956 | No | No | No |
| 2142 | AGAAGUGCAUCUUCUUACA | UGUAAGAAGAUGCACUUCU | 2143 | 959 | No | No | No |
| 2144 | AAGUGCAUCUUCUUACUCA | UGAGUAAGAAGAUGCACUU | 2145 | 961 | No | No | No |
| 2146 | AGUGCAUCUUCUUACUCUA | UAGAGUAAGAAGAUGCACU | 2147 | 962 | No | No | No |
| 2148 | GUGCAUCUUCUUACUCUUA | UAAGAGUAAGAAGAUGCAC | 2149 | 963 | No | No | No |
| 2150 | UCUUCUUACUCUUCAUCAA | UUGAUGAAGAGUAAGAAGA | 2151 | 968 | Yes | No | No |
| 2152 | CUUCUUACUCUUCAUCAAA | UUUGAUGAAGAGUAAGAAG | 2153 | 969 | Yes | No | No |
| 2154 | UCUUACUCUUCAUCAACCA | UGGUUGAUGAAGAGUAAGA | 2155 | 971 | Yes | No | No |
| 2156 | UUACUCUUCAUCAACCAUA | UAUGGUUGAUGAAGAGUAA | 2157 | 973 | Yes | No | No |
| 2158 | ACUCUUCAUCAACCAUCGA | UCGAUGGUUGAUGAAGAGU | 2159 | 975 | Yes | No | No |
| 2160 | CUCUUCAUCAACCAUCGUA | UACGAUGGUUGAUGAAGAG | 2161 | 976 | Yes | No | No |
| 2162 | CUUCAUCAACCAUCGUCUA | UAGACGAUGGUUGAUGAAG | 2163 | 978 | Yes | No | No |
| 2164 | UUCAUCAACCAUCGUCUGA | UCAGACGAUGGUUGAUGAA | 2165 | 979 | Yes | No | No |
| 2166 | AUCAACCAUCGUCUGGUAA | UUACCAGACGAUGGUUGAU | 2167 | 982 | Yes | No | No |
| 2168 | UCAACCAUCGUCUGGUAGA | UCUACCAGACGAUGGUUGA | 2169 | 983 | Yes | No | No |
| 2170 | CAACCAUCGUCUGGUAGAA | UUCUACCAGACGAUGGUUG | 2171 | 984 | Yes | No | No |
| 2172 | AACCAUCGUCUGGUAGAAA | UUUCUACCAGACGAUGGUU | 2173 | 985 | Yes | No | No |
| 2174 | CCAUCGUCUGGUAGAAUCA | UGAUUCUACCAGACGAUGG | 2175 | 987 | Yes | No | No |
| 2176 | CAUCGUCUGGUAGAAUCAA | UUGAUUCUACCAGACGAUG | 2177 | 988 | Yes | No | No |
| 2178 | AUCGUCUGGUAGAAUCAAA | UUUGAUUCUACCAGACGAU | 2179 | 989 | Yes | No | No |
| 2180 | CGUCUGGUAGAAUCAACUA | UAGUUGAUUCUACCAGACG | 2181 | 991 | Yes | No | No |
| 2182 | UCUGGUAGAAUCAACUUCA | UGAAGUUGAUUCUACCAGA | 2183 | 993 | Yes | No | No |
| 2184 | CUGGUAGAAUCAACUUCCA | UGGAAGUUGAUUCUACCAG | 2185 | 994 | Yes | No | No |
| 2186 | UGGUAGAAUCAACUUCCUA | UAGGAAGUUGAUUCUACCA | 2187 | 995 | Yes | No | No |
| 2188 | GAAUCAACUUCCUUGAGAA | UUCUCAAGGAAGUUGAUUC | 2189 | 1000 | Yes | No | No |
| 2190 | AAUCAACUUCCUUGAGAAA | UUUCUCAAGGAAGUUGAUU | 2191 | 1001 | Yes | No | No |
| 2192 | CAACUUCCUUGAGAAAAGA | UCUUUUCUCAAGGAAGUUG | 2193 | 1004 | Yes | No | No |
| 2194 | AACUUCCUUGAGAAAAGCA | UGCUUUUCUCAAGGAAGUU | 2195 | 1005 | Yes | No | No |
| 2196 | ACUUCCUUGAGAAAAGCCA | UGGCUUUUCUCAAGGAAGU | 2197 | 1006 | Yes | No | No |
| 2198 | UUCCUUGAGAAAAGCCAUA | UAUGGCUUUUCUCAAGGAA | 2199 | 1008 | Yes | No | No |
| 2200 | CCUUGAGAAAAGCCAUAGA | UCUAUGGCUUUUCUCAAGG | 2201 | 1010 | Yes | No | No |
| 2202 | UGAGAAAAGCCAUAGAAAA | UUUUCUAUGGCUUUUCUCA | 2203 | 1013 | Yes | No | No |
| 2204 | AGCCAUAGAAACAGUGUAA | UUACACUGUUUCUAUGGCU | 2205 | 1020 | Yes | No | No |
| 2206 | CAUAGAAACAGUGUAUGCA | UGCAUACACUGUUUCUAUG | 2207 | 1023 | Yes | No | No |
| 2208 | UAGAAACAGUGUAUGCAGA | UCUGCAUACACUGUUUCUA | 2209 | 1025 | Yes | No | No |
| 2210 | AGAAACAGUGUAUGCAGCA | UGCUGCAUACACUGUUUCU | 2211 | 1026 | Yes | No | No |
| 2212 | ACAGUGUAUGCAGCCUAUA | UAUAGGCUGCAUACACUGU | 2213 | 1030 | No | No | No |
| 2214 | CAGUGUAUGCAGCCUAUUA | UAAUAGGCUGCAUACACUG | 2215 | 1031 | No | No | No |
| 2216 | GUGUAUGCAGCCUAUUUGA | UCAAAUAGGCUGCAUACAC | 2217 | 1033 | No | No | No |
| 2218 | UGUAUGCAGCCUAUUUGCA | UGCAAAUAGGCUGCAUACA | 2219 | 1034 | No | No | No |
| 2220 | GUAUGCAGCCUAUUUGCCA | UGGCAAAUAGGCUGCAUAC | 2221 | 1035 | No | No | No |
| 2222 | GCAGCCUAUUUGCCCAAAA | UUUUGGGCAAAUAGGCUGC | 2223 | 1039 | No | No | No |
| 2224 | AAACACACACCCAUUCCUA | UAGGAAUGGGUGUGUGUUU | 2225 | 1056 | Yes | Yes | No |
| 2226 | AACACACACCCAUUCCUGA | UCAGGAAUGGGUGUGUGUU | 2227 | 1057 | Yes | Yes | No |
| 2228 | ACACACACCCAUUCCUGUA | UACAGGAAUGGGUGUGUGU | 2229 | 1058 | Yes | Yes | No |
| 2230 | CACACACCCAUUCCUGUAA | UUACAGGAAUGGGUGUGUG | 2231 | 1059 | Yes | Yes | No |
| 2232 | ACACACCCAUUCCUGUACA | UGUACAGGAAUGGGUGUGU | 2233 | 1060 | Yes | Yes | No |
| 2234 | ACACCCAUUCCUGUACCUA | UAGGUACAGGAAUGGGUGU | 2235 | 1062 | Yes | Yes | No |
| 2236 | ACCCAUUCCUGUACCUCAA | UUGAGGUACAGGAAUGGGU | 2237 | 1064 | Yes | Yes | Yes |
| 2238 | CCCAUUCCUGUACCUCAGA | UCUGAGGUACAGGAAUGGG | 2239 | 1065 | Yes | Yes | No |
| 2240 | CAUUCCUGUACCUCAGUUA | UAACUGAGGUACAGGAAUG | 2241 | 1067 | Yes | Yes | No |
| 2242 | UUCCUGUACCUCAGUUUAA | UUAAACUGAGGUACAGGAA | 2243 | 1069 | Yes | No | No |
| 2244 | UCCUGUACCUCAGUUUAGA | UCUAAACUGAGGUACAGGA | 2245 | 1070 | Yes | No | No |
| 2246 | CCUGUACCUCAGUUUAGAA | UUCUAAACUGAGGUACAGG | 2247 | 1071 | Yes | No | No |
| 2248 | GUACCUCAGUUUAGAAAUA | UAUUUCUAAACUGAGGUAC | 2249 | 1074 | Yes | No | No |
| 2250 | CUCAGUUUAGAAAUCAGUA | UACUGAUUUCUAAACUGAG | 2251 | 1078 | Yes | No | No |
| 2252 | UCAGUUUAGAAAUCAGUCA | UGACUGAUUUCUAAACUGA | 2253 | 1079 | Yes | No | No |
| 2254 | CAGUUUAGAAAUCAGUCCA | UGGACUGAUUUCUAAACUG | 2255 | 1080 | Yes | No | No |
| 2256 | AAUCAGUCCCCAGAAUGUA | UACAUUCUGGGGACUGAUU | 2257 | 1089 | Yes | No | No |
| 2258 | UCAGUCCCCAGAAUGUGGA | UCCACAUUCUGGGGACUGA | 2259 | 1091 | Yes | No | No |
| 2260 | CAGUCCCCAGAAUGUGGAA | UUCCACAUUCUGGGGACUG | 2261 | 1092 | Yes | No | No |
| 2262 | AGUCCCCAGAAUGUGGAUA | UAUCCACAUUCUGGGGACU | 2263 | 1093 | Yes | No | No |
| 2264 | UCCCCAGAAUGUGGAUGUA | UACAUCCACAUUCUGGGGA | 2265 | 1095 | Yes | No | No |
| 2266 | CCCCAGAAUGUGGAUGUUA | UAACAUCCACAUUCUGGGG | 2267 | 1096 | Yes | No | No |
| 2268 | CCCAGAAUGUGGAUGUUAA | UUAACAUCCACAUUCUGGG | 2269 | 1097 | Yes | No | No |
| 2270 | CCAGAAUGUGGAUGUUAAA | UUUAACAUCCACAUUCUGG | 2271 | 1098 | Yes | No | No |
| 2272 | CAGAAUGUGGAUGUUAAUA | UAUUAACAUCCACAUUCUG | 2273 | 1099 | Yes | No | No |
| 2274 | AUGUGGAUGUUAAUGUGCA | UGCACAUUAACAUCCACAU | 2275 | 1103 | Yes | No | No |
| 2276 | UGUGGAUGUUAAUGUGCAA | UUGCACAUUAACAUCCACA | 2277 | 1104 | Yes | No | No |
| 2278 | GUGGAUGUUAAUGUGCACA | UGUGCACAUUAACAUCCAC | 2279 | 1105 | Yes | No | No |
| 2280 | UAAUGUGCACCCCACAAAA | UUUUGUGGGGUGCACAUUA | 2281 | 1113 | Yes | No | No |
| 2282 | AAUGUGCACCCCACAAAGA | UCUUUGUGGGGUGCACAUU | 2283 | 1114 | Yes | No | No |
| 2284 | UGCACCCCACAAAGCAUGA | UCAUGCUUUGUGGGGUGCA | 2285 | 1118 | Yes | No | No |
| 2286 | GCACCCCACAAAGCAUGAA | UUCAUGCUUUGUGGGGUGC | 2287 | 1119 | Yes | No | No |
| 2288 | CCCACAAAGCAUGAAGUUA | UAACUUCAUGCUUUGUGGG | 2289 | 1123 | Yes | No | No |
| 2290 | CCACAAAGCAUGAAGUUCA | UGAACUUCAUGCUUUGUGG | 2291 | 1124 | Yes | No | No |
| 2292 | CAAAGCAUGAAGUUCACUA | UAGUGAACUUCAUGCUUUG | 2293 | 1127 | Yes | No | No |
| 2294 | AAAGCAUGAAGUUCACUUA | UAAGUGAACUUCAUGCUUU | 2295 | 1128 | Yes | No | No |
| 2296 | AAGCAUGAAGUUCACUUCA | UGAAGUGAACUUCAUGCUU | 2297 | 1129 | Yes | No | No |
| 2298 | GCAUGAAGUUCACUUCCUA | UAGGAAGUGAACUUCAUGC | 2299 | 1131 | Yes | No | No |
| 2300 | CCUGCACGAGGAGAGCAUA | UAUGCUCUCCUCGUGCAGG | 2301 | 1146 | Yes | No | No |
| 2302 | CUGCACGAGGAGAGCAUCA | UGAUGCUCUCCUCGUGCAG | 2303 | 1147 | Yes | No | No |
| 2304 | CGAGGAGAGCAUCCUGGAA | UUCCAGGAUGCUCUCCUCG | 2305 | 1152 | Yes | No | No |
| 2306 | GGUGCAGCAGCACAUCGAA | UUCGAUGUGCUGCUGCACC | 2307 | 1173 | No | No | No |
| 2308 | CAGCACAUCGAGAGCAAGA | UCUUGCUCUCGAUGUGCUG | 2309 | 1180 | Yes | No | Yes |
| 2310 | GCACAUCGAGAGCAAGCUA | UAGCUUGCUCUCGAUGUGC | 2311 | 1182 | Yes | No | Yes |
| 2312 | CAUCGAGAGCAAGCUCCUA | UAGGAGCUUGCUCUCGAUG | 2313 | 1185 | Yes | No | No |
| 2314 | AAGCUCCUGGGCUCCAAUA | UAUUGGAGCCCAGGAGCUU | 2315 | 1195 | Yes | No | No |
| 2316 | AGCUCCUGGGCUCCAAUUA | UAAUUGGAGCCCAGGAGCU | 2317 | 1196 | Yes | No | No |
| 2318 | CUCCUGGGCUCCAAUUCCA | UGGAAUUGGAGCCCAGGAG | 2319 | 1198 | Yes | No | No |
| 2320 | UCCUGGGCUCCAAUUCCUA | UAGGAAUUGGAGCCCAGGA | 2321 | 1199 | Yes | No | No |
| 2322 | CCUGGGCUCCAAUUCCUCA | UGAGGAAUUGGAGCCCAGG | 2323 | 1200 | Yes | No | No |
| 2324 | CUCCAAUUCCUCCAGGAUA | UAUCCUGGAGGAAUUGGAG | 2325 | 1206 | Yes | Yes | No |
| 2326 | CCAAUUCCUCCAGGAUGUA | UACAUCCUGGAGGAAUUGG | 2327 | 1208 | Yes | Yes | No |
| 2328 | AAUUCCUCCAGGAUGUACA | UGUACAUCCUGGAGGAAUU | 2329 | 1210 | Yes | No | No |
| 2330 | AUUCCUCCAGGAUGUACUA | UAGUACAUCCUGGAGGAAU | 2331 | 1211 | Yes | No | No |
| 2332 | UUCCUCCAGGAUGUACUUA | UAAGUACAUCCUGGAGGAA | 2333 | 1212 | Yes | No | No |
| 2334 | CCUCCAGGAUGUACUUCAA | UUGAAGUACAUCCUGGAGG | 2335 | 1214 | Yes | No | No |
| 2336 | CUCCAGGAUGUACUUCACA | UGUGAAGUACAUCCUGGAG | 2337 | 1215 | Yes | No | No |
| 2338 | CAGGAUGUACUUCACCCAA | UUGGGUGAAGUACAUCCUG | 2339 | 1218 | Yes | No | No |
| 2340 | UGUACUUCACCCAGACUUA | UAAGUCUGGGUGAAGUACA | 2341 | 1223 | Yes | No | No |
| 2342 | UACUUCACCCAGACUUUGA | UCAAAGUCUGGGUGAAGUA | 2343 | 1225 | Yes | No | No |
| 2344 | CUUCACCCAGACUUUGCUA | UAGCAAAGUCUGGGUGAAG | 2345 | 1227 | Yes | No | No |
| 2346 | UUCACCCAGACUUUGCUAA | UUAGCAAAGUCUGGGUGAA | 2347 | 1228 | Yes | No | No |
| 2348 | UCACCCAGACUUUGCUACA | UGUAGCAAAGUCUGGGUGA | 2349 | 1229 | Yes | No | No |
| 2350 | ACCCAGACUUUGCUACCAA | UUGGUAGCAAAGUCUGGGU | 2351 | 1231 | Yes | No | No |
| 2352 | CAGACUUUGCUACCAGGAA | UUCCUGGUAGCAAAGUCUG | 2353 | 1234 | Yes | No | No |
| 2354 | ACUUUGCUACCAGGACUUA | UAAGUCCUGGUAGCAAAGU | 2355 | 1237 | Yes | No | No |
| 2356 | CUUUGCUACCAGGACUUGA | UCAAGUCCUGGUAGCAAAG | 2357 | 1238 | Yes | No | No |
| 2358 | UUGCUACCAGGACUUGCUA | UAGCAAGUCCUGGUAGCAA | 2359 | 1240 | Yes | No | No |
| 2360 | UGCUACCAGGACUUGCUGA | UCAGCAAGUCCUGGUAGCA | 2361 | 1241 | Yes | No | No |
| 2362 | CUCUGGGGAGAUGGUUAAA | UUUAACCAUCUCCCCAGAG | 2363 | 1263 | Yes | No | No |
| 2364 | CUGGGGAGAUGGUUAAAUA | UAUUUAACCAUCUCCCCAG | 2365 | 1265 | Yes | No | No |
| 2366 | UGGGGAGAUGGUUAAAUCA | UGAUUUAACCAUCUCCCCA | 2367 | 1266 | Yes | No | No |
| 2368 | GGGGAGAUGGUUAAAUCCA | UGGAUUUAACCAUCUCCCC | 2369 | 1267 | Yes | No | No |
| 2370 | GGGAGAUGGUUAAAUCCAA | UUGGAUUUAACCAUCUCCC | 2371 | 1268 | Yes | No | No |
| 2372 | GGAGAUGGUUAAAUCCACA | UGUGGAUUUAACCAUCUCC | 2373 | 1269 | Yes | No | No |
| 2374 | UGGUUAAAUCCACAACAAA | UUUGUUGUGGAUUUAACCA | 2375 | 1274 | No | No | No |
| 2376 | GGUUAAAUCCACAACAAGA | UCUUGUUGUGGAUUUAACC | 2377 | 1275 | No | No | No |
| 2378 | GUUAAAUCCACAACAAGUA | UACUUGUUGUGGAUUUAAC | 2379 | 1276 | No | No | No |
| 2380 | UAAAUCCACAACAAGUCUA | UAGACUUGUUGUGGAUUUA | 2381 | 1278 | No | No | No |
| 2382 | AUCCACAACAAGUCUGACA | UGUCAGACUUGUUGUGGAU | 2383 | 1281 | No | No | No |
| 2384 | AAGUCUGACCUCGUCUUCA | UGAAGACGAGGUCAGACUU | 2385 | 1290 | No | No | No |
| 2386 | AGUCUGACCUCGUCUUCUA | UAGAAGACGAGGUCAGACU | 2387 | 1291 | No | No | No |
| 2388 | UCUGACCUCGUCUUCUACA | UGUAGAAGACGAGGUCAGA | 2389 | 1293 | No | No | No |
| 2390 | CUGACCUCGUCUUCUACUA | UAGUAGAAGACGAGGUCAG | 2391 | 1294 | No | No | No |
| 2392 | UGACCUCGUCUUCUACUUA | UAAGUAGAAGACGAGGUCA | 2393 | 1295 | No | No | No |
| 2394 | UCUACUUCUGGAAGUAGUA | UACUACUUCCAGAAGUAGA | 2395 | 1306 | Yes | No | No |
| 2396 | CUACUUCUGGAAGUAGUGA | UCACUACUUCCAGAAGUAG | 2397 | 1307 | Yes | No | No |
| 2398 | UACUUCUGGAAGUAGUGAA | UUCACUACUUCCAGAAGUA | 2399 | 1308 | Yes | No | No |
| 2400 | UCUGGAAGUAGUGAUAAGA | UCUUAUCACUACUUCCAGA | 2401 | 1312 | No | No | No |
| 2402 | CUGGAAGUAGUGAUAAGGA | UCCUUAUCACUACUUCCAG | 2403 | 1313 | No | No | No |
| 2404 | UGGAAGUAGUGAUAAGGUA | UACCUUAUCACUACUUCCA | 2405 | 1314 | No | No | No |
| 2406 | GGAAGUAGUGAUAAGGUCA | UGACCUUAUCACUACUUCC | 2407 | 1315 | No | No | No |
| 2408 | GAAGUAGUGAUAAGGUCUA | UAGACCUUAUCACUACUUC | 2409 | 1316 | No | No | No |
| 2410 | AAGUAGUGAUAAGGUCUAA | UUAGACCUUAUCACUACUU | 2411 | 1317 | No | No | No |
| 2412 | AGUAGUGAUAAGGUCUAUA | UAUAGACCUUAUCACUACU | 2413 | 1318 | No | No | No |
| 2414 | GUAGUGAUAAGGUCUAUGA | UCAUAGACCUUAUCACUAC | 2415 | 1319 | No | No | No |
| 2416 | UAGUGAUAAGGUCUAUGCA | UGCAUAGACCUUAUCACUA | 2417 | 1320 | No | No | No |
| 2418 | UGAUAAGGUCUAUGCCCAA | UUGGGCAUAGACCUUAUCA | 2419 | 1323 | No | No | No |
| 2420 | GGUCUAUGCCCACCAGAUA | UAUCUGGUGGGCAUAGACC | 2421 | 1329 | Yes | No | No |
| 2422 | GUCUAUGCCCACCAGAUGA | UCAUCUGGUGGGCAUAGAC | 2423 | 1330 | Yes | No | No |
| 2424 | CUAUGCCCACCAGAUGGUA | UACCAUCUGGUGGGCAUAG | 2425 | 1332 | Yes | No | No |
| 2426 | UAUGCCCACCAGAUGGUUA | UAACCAUCUGGUGGGCAUA | 2427 | 1333 | Yes | No | No |
| 2428 | UGCCCACCAGAUGGUUCGA | UCGAACCAUCUGGUGGGCA | 2429 | 1335 | Yes | No | No |
| 2430 | GCCCACCAGAUGGUUCGUA | UACGAACCAUCUGGUGGGC | 2431 | 1336 | Yes | No | No |
| 2432 | CCCACCAGAUGGUUCGUAA | UUACGAACCAUCUGGUGGG | 2433 | 1337 | Yes | No | No |
| 2434 | CCACCAGAUGGUUCGUACA | UGUACGAACCAUCUGGUGG | 2435 | 1338 | Yes | No | No |
| 2436 | CCAGAUGGUUCGUACAGAA | UUCUGUACGAACCAUCUGG | 2437 | 1341 | Yes | No | No |
| 2438 | UGGUUCGUACAGAUUCCCA | UGGGAAUCUGUACGAACCA | 2439 | 1346 | Yes | No | No |
| 2440 | CAGAUUCCCGGGAACAGAA | UUCUGUUCCCGGGAAUCUG | 2441 | 1355 | Yes | No | No |
| 2442 | AGAUUCCCGGGAACAGAAA | UUUCUGUUCCCGGGAAUCU | 2443 | 1356 | Yes | No | No |
| 2444 | AUUCCCGGGAACAGAAGCA | UGCUUCUGUUCCCGGGAAU | 2445 | 1358 | Yes | No | No |
| 2446 | UUCCCGGGAACAGAAGCUA | UAGCUUCUGUUCCCGGGAA | 2447 | 1359 | Yes | No | No |
| 2448 | CCCGGGAACAGAAGCUUGA | UCAAGCUUCUGUUCCCGGG | 2449 | 1361 | Yes | No | No |
| 2450 | CCGGGAACAGAAGCUUGAA | UUCAAGCUUCUGUUCCCGG | 2451 | 1362 | Yes | No | No |
| 2452 | CGGGAACAGAAGCUUGAUA | UAUCAAGCUUCUGUUCCCG | 2453 | 1363 | Yes | No | No |
| 2454 | GGAACAGAAGCUUGAUGCA | UGCAUCAAGCUUCUGUUCC | 2455 | 1365 | Yes | No | No |
| 2456 | ACAGAAGCUUGAUGCAUUA | UAAUGCAUCAAGCUUCUGU | 2457 | 1368 | Yes | No | No |
| 2458 | AGAAGCUUGAUGCAUUUCA | UGAAAUGCAUCAAGCUUCU | 2459 | 1370 | Yes | No | No |
| 2460 | GAAGCUUGAUGCAUUUCUA | UAGAAAUGCAUCAAGCUUC | 2461 | 1371 | Yes | No | No |
| 2462 | GCUUGAUGCAUUUCUGCAA | UUGCAGAAAUGCAUCAAGC | 2463 | 1374 | Yes | No | No |
| 2464 | GCAGCCUCUGAGCAAACCA | UGGUUUGCUCAGAGGCUGC | 2465 | 1389 | Yes | No | No |
| 2466 | AGCAAACCCCUGUCCAGUA | UACUGGACAGGGGUUUGCU | 2467 | 1399 | Yes | No | No |
| 2468 | AGCCCCAGGCCAUUGUCAA | UUGACAAUGGCCUGGGGCU | 2469 | 1418 | No | No | No |
| 2470 | CCCCAGGCCAUUGUCACAA | UUGUGACAAUGGCCUGGGG | 2471 | 1420 | No | No | No |
| 2472 | CCCAGGCCAUUGUCACAGA | UCUGUGACAAUGGCCUGGG | 2473 | 1421 | No | No | No |
| 2474 | GGCCAUUGUCACAGAGGAA | UUCCUCUGUGACAAUGGCC | 2475 | 1425 | No | No | No |
| 2476 | CCAUUGUCACAGAGGAUAA | UUAUCCUCUGUGACAAUGG | 2477 | 1427 | No | No | No |
| 2478 | CAUUGUCACAGAGGAUAAA | UUUAUCCUCUGUGACAAUG | 2479 | 1428 | No | No | No |
| 2480 | UUGUCACAGAGGAUAAGAA | UUCUUAUCCUCUGUGACAA | 2481 | 1430 | No | No | No |
| 2482 | UGUCACAGAGGAUAAGACA | UGUCUUAUCCUCUGUGACA | 2483 | 1431 | No | No | No |
| 2484 | CACAGAGGAUAAGACAGAA | UUCUGUCUUAUCCUCUGUG | 2485 | 1434 | No | No | No |
| 2486 | AGAGGAUAAGACAGAUAUA | UAUAUCUGUCUUAUCCUCU | 2487 | 1437 | Yes | No | No |
| 2488 | GAGGAUAAGACAGAUAUUA | UAAUAUCUGUCUUAUCCUC | 2489 | 1438 | Yes | No | No |
| 2490 | GAUAAGACAGAUAUUUCUA | UAGAAAUAUCUGUCUUAUC | 2491 | 1441 | Yes | No | No |
| 2492 | AUAAGACAGAUAUUUCUAA | UUAGAAAUAUCUGUCUUAU | 2493 | 1442 | Yes | No | No |
| 2494 | GACAGAUAUUUCUAGUGGA | UCCACUAGAAAUAUCUGUC | 2495 | 1446 | Yes | No | No |
| 2496 | AGGGCUAGGCAGCAAGAUA | UAUCUUGCUGCCUAGCCCU | 2497 | 1465 | Yes | No | No |
| 2498 | GGGCUAGGCAGCAAGAUGA | UCAUCUUGCUGCCUAGCCC | 2499 | 1466 | Yes | No | No |
| 2500 | GGCUAGGCAGCAAGAUGAA | UUCAUCUUGCUGCCUAGCC | 2501 | 1467 | Yes | No | No |
| 2502 | CUAGGCAGCAAGAUGAGGA | UCCUCAUCUUGCUGCCUAG | 2503 | 1469 | Yes | No | No |
| 2504 | UAGGCAGCAAGAUGAGGAA | UUCCUCAUCUUGCUGCCUA | 2505 | 1470 | Yes | No | No |
| 2506 | GCAAGAUGAGGAGAUGCUA | UAGCAUCUCCUCAUCUUGC | 2507 | 1476 | Yes | No | No |
| 2508 | CAAGAUGAGGAGAUGCUUA | UAAGCAUCUCCUCAUCUUG | 2509 | 1477 | Yes | No | No |
| 2510 | UGAGGAGAUGCUUGAACUA | UAGUUCAAGCAUCUCCUCA | 2511 | 1482 | Yes | No | No |
| 2512 | GGGAUACAACAAAGGGGAA | UUCCCCUUUGUUGUAUCCC | 2513 | 1544 | Yes | No | No |
| 2514 | ACAACAAAGGGGACUUCAA | UUGAAGUCCCCUUUGUUGU | 2515 | 1549 | No | No | No |
| 2516 | ACAAAGGGGACUUCAGAAA | UUUCUGAAGUCCCCUUUGU | 2517 | 1552 | No | No | No |
| 2518 | CAAAGGGGACUUCAGAAAA | UUUUCUGAAGUCCCCUUUG | 2519 | 1553 | No | No | No |
| 2520 | AAAGGGGACUUCAGAAAUA | UAUUUCUGAAGUCCCCUUU | 2521 | 1554 | No | No | No |
| 2522 | AAGGGGACUUCAGAAAUGA | UCAUUUCUGAAGUCCCCUU | 2523 | 1555 | No | No | No |
| 2524 | GGGGACUUCAGAAAUGUCA | UGACAUUUCUGAAGUCCCC | 2525 | 1557 | No | No | No |
| 2526 | GAAGAGAGGACCUACUUCA | UGAAGUAGGUCCUCUCUUC | 2527 | 1578 | No | No | No |
| 2528 | AAGAGAGGACCUACUUCCA | UGGAAGUAGGUCCUCUCUU | 2529 | 1579 | No | No | No |
| 2530 | AGAGAGGACCUACUUCCAA | UUGGAAGUAGGUCCUCUCU | 2531 | 1580 | No | No | No |
| 2532 | GAGAGGACCUACUUCCAGA | UCUGGAAGUAGGUCCUCUC | 2533 | 1581 | No | No | No |
| 2534 | AGGACCUACUUCCAGCAAA | UUUGCUGGAAGUAGGUCCU | 2535 | 1584 | No | No | No |
| 2536 | CAACCCCAGAAAGAGACAA | UUGUCUCUUUCUGGGGUUG | 2537 | 1599 | Yes | No | No |
| 2538 | ACCCCAGAAAGAGACAUCA | UGAUGUCUCUUUCUGGGGU | 2539 | 1601 | Yes | No | No |
| 2540 | CCCCAGAAAGAGACAUCGA | UCGAUGUCUCUUUCUGGGG | 2541 | 1602 | Yes | No | No |
| 2542 | AGAAAGAGACAUCGGGAAA | UUUCCCGAUGUCUCUUUCU | 2543 | 1606 | Yes | No | No |
| 2544 | ACAUCGGGAAGAUUCUGAA | UUCAGAAUCUUCCCGAUGU | 2545 | 1614 | Yes | No | No |
| 2546 | CAUCGGGAAGAUUCUGAUA | UAUCAGAAUCUUCCCGAUG | 2547 | 1615 | Yes | No | No |
| 2548 | AUCGGGAAGAUUCUGAUGA | UCAUCAGAAUCUUCCCGAU | 2549 | 1616 | Yes | No | No |
| 2550 | CGGGAAGAUUCUGAUGUGA | UCACAUCAGAAUCUUCCCG | 2551 | 1618 | Yes | No | No |
| 2552 | GGGAAGAUUCUGAUGUGGA | UCCACAUCAGAAUCUUCCC | 2553 | 1619 | Yes | No | No |
| 2554 | GGAAGAUUCUGAUGUGGAA | UUCCACAUCAGAAUCUUCC | 2555 | 1620 | Yes | No | No |
| 2556 | GAAGAUUCUGAUGUGGAAA | UUUCCACAUCAGAAUCUUC | 2557 | 1621 | Yes | No | No |
| 2558 | AGAUUCUGAUGUGGAAAUA | UAUUUCCACAUCAGAAUCU | 2559 | 1623 | Yes | No | No |
| 2560 | UGAUGUGGAAAUGGUGGAA | UUCCACCAUUUCCACAUCA | 2561 | 1629 | Yes | Yes | No |
| 2562 | GAAAUGGUGGAAGAUGAUA | UAUCAUCUUCCACCAUUUC | 2563 | 1636 | Yes | No | No |
| 2564 | AAAUGGUGGAAGAUGAUUA | UAAUCAUCUUCCACCAUUU | 2565 | 1637 | Yes | No | No |
| 2566 | AAUGGUGGAAGAUGAUUCA | UGAAUCAUCUUCCACCAUU | 2567 | 1638 | Yes | No | No |
| 2568 | AUGGUGGAAGAUGAUUCCA | UGGAAUCAUCUUCCACCAU | 2569 | 1639 | Yes | No | No |
| 2570 | GUGGAAGAUGAUUCCCGAA | UUCGGGAAUCAUCUUCCAC | 2571 | 1642 | Yes | No | No |
| 2572 | GGAAGAUGAUUCCCGAAAA | UUUUCGGGAAUCAUCUUCC | 2573 | 1644 | Yes | No | No |
| 2574 | AGAUGAUUCCCGAAAGGAA | UUCCUUUCGGGAAUCAUCU | 2575 | 1647 | Yes | No | No |
| 2576 | AUGAUUCCCGAAAGGAAAA | UUUUCCUUUCGGGAAUCAU | 2577 | 1649 | Yes | No | No |
| 2578 | UCCCGAAAGGAAAUGACUA | UAGUCAUUUCCUUUCGGGA | 2579 | 1654 | Yes | No | No |
| 2580 | CCCGAAAGGAAAUGACUGA | UCAGUCAUUUCCUUUCGGG | 2581 | 1655 | Yes | No | No |
| 2582 | CCGAAAGGAAAUGACUGCA | UGCAGUCAUUUCCUUUCGG | 2583 | 1656 | Yes | No | No |
| 2584 | CGAAAGGAAAUGACUGCAA | UUGCAGUCAUUUCCUUUCG | 2585 | 1657 | Yes | No | No |
| 2586 | AAUGACUGCAGCUUGUACA | UGUACAAGCUGCAGUCAUU | 2587 | 1665 | Yes | No | No |
| 2588 | AUGACUGCAGCUUGUACCA | UGGUACAAGCUGCAGUCAU | 2589 | 1666 | Yes | No | No |
| 2590 | UGACUGCAGCUUGUACCCA | UGGGUACAAGCUGCAGUCA | 2591 | 1667 | Yes | No | No |
| 2592 | CCCCGGAGAAGGAUCAUUA | UAAUGAUCCUUCUCCGGGG | 2593 | 1684 | Yes | No | No |
| 2594 | CCGGAGAAGGAUCAUUAAA | UUUAAUGAUCCUUCUCCGG | 2595 | 1686 | Yes | No | No |
| 2596 | GGAGAAGGAUCAUUAACCA | UGGUUAAUGAUCCUUCUCC | 2597 | 1688 | Yes | No | No |
| 2598 | GAGAAGGAUCAUUAACCUA | UAGGUUAAUGAUCCUUCUC | 2599 | 1689 | Yes | No | No |
| 2600 | AGAAGGAUCAUUAACCUCA | UGAGGUUAAUGAUCCUUCU | 2601 | 1690 | Yes | No | No |
| 2602 | GAAGGAUCAUUAACCUCAA | UUGAGGUUAAUGAUCCUUC | 2603 | 1691 | Yes | No | No |
| 2604 | AAGGAUCAUUAACCUCACA | UGUGAGGUUAAUGAUCCUU | 2605 | 1692 | Yes | No | No |
| 2606 | AGGAUCAUUAACCUCACUA | UAGUGAGGUUAAUGAUCCU | 2607 | 1693 | Yes | No | No |
| 2608 | AUCAUUAACCUCACUAGUA | UACUAGUGAGGUUAAUGAU | 2609 | 1696 | Yes | No | No |
| 2610 | UCAUUAACCUCACUAGUGA | UCACUAGUGAGGUUAAUGA | 2611 | 1697 | Yes | No | No |
| 2612 | CAUUAACCUCACUAGUGUA | UACACUAGUGAGGUUAAUG | 2613 | 1698 | Yes | No | No |
| 2614 | AUUAACCUCACUAGUGUUA | UAACACUAGUGAGGUUAAU | 2615 | 1699 | Yes | No | No |
| 2616 | UUAACCUCACUAGUGUUUA | UAAACACUAGUGAGGUUAA | 2617 | 1700 | Yes | No | No |
| 2618 | AACCUCACUAGUGUUUUGA | UCAAAACACUAGUGAGGUU | 2619 | 1702 | Yes | No | No |
| 2620 | ACCUCACUAGUGUUUUGAA | UUCAAAACACUAGUGAGGU | 2621 | 1703 | Yes | No | No |
| 2622 | CCUCACUAGUGUUUUGAGA | UCUCAAAACACUAGUGAGG | 2623 | 1704 | Yes | No | No |
| 2624 | CUCACUAGUGUUUUGAGUA | UACUCAAAACACUAGUGAG | 2625 | 1705 | Yes | No | No |
| 2626 | UCACUAGUGUUUUGAGUCA | UGACUCAAAACACUAGUGA | 2627 | 1706 | Yes | No | No |
| 2628 | CACUAGUGUUUUGAGUCUA | UAGACUCAAAACACUAGUG | 2629 | 1707 | Yes | No | No |
| 2630 | ACUAGUGUUUUGAGUCUCA | UGAGACUCAAAACACUAGU | 2631 | 1708 | Yes | No | No |
| 2632 | UAGUGUUUUGAGUCUCCAA | UUGGAGACUCAAAACACUA | 2633 | 1710 | Yes | No | No |
| 2634 | GUUUUGAGUCUCCAGGAAA | UUUCCUGGAGACUCAAAAC | 2635 | 1714 | Yes | No | Yes |
| 2636 | AUUAAUGAGCAGGGACAUA | UAUGUCCCUGCUCAUUAAU | 2637 | 1735 | No | No | No |
| 2638 | UAAUGAGCAGGGACAUGAA | UUCAUGUCCCUGCUCAUUA | 2639 | 1737 | No | No | No |
| 2640 | AAUGAGCAGGGACAUGAGA | UCUCAUGUCCCUGCUCAUU | 2641 | 1738 | No | No | No |
| 2642 | UGAGCAGGGACAUGAGGUA | UACCUCAUGUCCCUGCUCA | 2643 | 1740 | No | No | No |
| 2644 | GCAGGGACAUGAGGUUCUA | UAGAACCUCAUGUCCCUGC | 2645 | 1743 | No | No | No |
| 2646 | CAGGGACAUGAGGUUCUCA | UGAGAACCUCAUGUCCCUG | 2647 | 1744 | No | No | No |
| 2648 | AGGUUCUCCGGGAGAUGUA | UACAUCUCCCGGAGAACCU | 2649 | 1754 | No | No | No |
| 2650 | GGUUCUCCGGGAGAUGUUA | UAACAUCUCCCGGAGAACC | 2651 | 1755 | No | No | No |
| 2652 | GUUCUCCGGGAGAUGUUGA | UCAACAUCUCCCGGAGAAC | 2653 | 1756 | No | No | No |
| 2654 | UUCUCCGGGAGAUGUUGCA | UGCAACAUCUCCCGGAGAA | 2655 | 1757 | No | No | No |
| 2656 | UCUCCGGGAGAUGUUGCAA | UUGCAACAUCUCCCGGAGA | 2657 | 1758 | No | No | No |
| 2658 | CUCCGGGAGAUGUUGCAUA | UAUGCAACAUCUCCCGGAG | 2659 | 1759 | No | No | No |
| 2660 | UCCGGGAGAUGUUGCAUAA | UUAUGCAACAUCUCCCGGA | 2661 | 1760 | No | No | No |
| 2662 | CCGGGAGAUGUUGCAUAAA | UUUAUGCAACAUCUCCCGG | 2663 | 1761 | No | No | No |
| 2664 | GGAGAUGUUGCAUAACCAA | UUGGUUAUGCAACAUCUCC | 2665 | 1764 | Yes | No | No |
| 2666 | CCUUCGUGGGCUGUGUGAA | UUCACACAGCCCACGAAGG | 2667 | 1784 | Yes | No | No |
| 2668 | CUUCGUGGGCUGUGUGAAA | UUUCACACAGCCCACGAAG | 2669 | 1785 | Yes | No | No |
| 2670 | UUCGUGGGCUGUGUGAAUA | UAUUCACACAGCCCACGAA | 2671 | 1786 | Yes | No | No |
| 2672 | UCGUGGGCUGUGUGAAUCA | UGAUUCACACAGCCCACGA | 2673 | 1787 | Yes | No | No |
| 2674 | GUGGGCUGUGUGAAUCCUA | UAGGAUUCACACAGCCCAC | 2675 | 1789 | Yes | Yes | Yes |
| 2676 | UGGGCUGUGUGAAUCCUCA | UGAGGAUUCACACAGCCCA | 2677 | 1790 | Yes | Yes | Yes |
| 2678 | GGGCUGUGUGAAUCCUCAA | UUGAGGAUUCACACAGCCC | 2679 | 1791 | Yes | Yes | Yes |
| 2680 | UCAGUGGGCCUUGGCACAA | UUGUGCCAAGGCCCACUGA | 2681 | 1806 | Yes | Yes | Yes |
| 2682 | GCCUUGGCACAGCAUCAAA | UUUGAUGCUGUGCCAAGGC | 2683 | 1813 | No | No | No |
| 2684 | CCUUGGCACAGCAUCAAAA | UUUUGAUGCUGUGCCAAGG | 2685 | 1814 | No | No | No |
| 2686 | CUUGGCACAGCAUCAAACA | UGUUUGAUGCUGUGCCAAG | 2687 | 1815 | No | No | No |
| 2688 | UUGGCACAGCAUCAAACCA | UGGUUUGAUGCUGUGCCAA | 2689 | 1816 | No | No | No |
| 2690 | GCACAGCAUCAAACCAAGA | UCUUGGUUUGAUGCUGUGC | 2691 | 1819 | No | No | No |
| 2692 | AGCAUCAAACCAAGUUAUA | UAUAACUUGGUUUGAUGCU | 2693 | 1823 | No | No | No |
| 2694 | GCAUCAAACCAAGUUAUAA | UUAUAACUUGGUUUGAUGC | 2695 | 1824 | No | No | No |
| 2696 | AUCAAACCAAGUUAUACCA | UGGUAUAACUUGGUUUGAU | 2697 | 1826 | No | No | No |
| 2698 | UCAAACCAAGUUAUACCUA | UAGGUAUAACUUGGUUUGA | 2699 | 1827 | No | No | No |
| 2700 | AAACCAAGUUAUACCUUCA | UGAAGGUAUAACUUGGUUU | 2701 | 1829 | No | No | No |
| 2702 | AACCAAGUUAUACCUUCUA | UAGAAGGUAUAACUUGGUU | 2703 | 1830 | No | No | No |
| 2704 | AGUUAUACCUUCUCAACAA | UUGUUGAGAAGGUAUAACU | 2705 | 1835 | No | No | No |
| 2706 | GUUAUACCUUCUCAACACA | UGUGUUGAGAAGGUAUAAC | 2707 | 1836 | No | No | No |
| 2708 | UAUACCUUCUCAACACCAA | UUGGUGUUGAGAAGGUAUA | 2709 | 1838 | No | No | No |
| 2710 | UCUCAACACCACCAAGCUA | UAGCUUGGUGGUGUUGAGA | 2711 | 1845 | No | No | No |
| 2712 | UCAACACCACCAAGCUUAA | UUAAGCUUGGUGGUGUUGA | 2713 | 1847 | No | No | No |
| 2714 | CAACACCACCAAGCUUAGA | UCUAAGCUUGGUGGUGUUG | 2715 | 1848 | No | No | No |
| 2716 | AACACCACCAAGCUUAGUA | UACUAAGCUUGGUGGUGUU | 2717 | 1849 | No | No | No |
| 2718 | ACACCACCAAGCUUAGUGA | UCACUAAGCUUGGUGGUGU | 2719 | 1850 | No | No | No |
| 2720 | ACCACCAAGCUUAGUGAAA | UUUCACUAAGCUUGGUGGU | 2721 | 1852 | Yes | No | No |
| 2722 | CCACCAAGCUUAGUGAAGA | UCUUCACUAAGCUUGGUGG | 2723 | 1853 | Yes | No | No |
| 2724 | ACCAAGCUUAGUGAAGAAA | UUUCUUCACUAAGCUUGGU | 2725 | 1855 | Yes | No | No |
| 2726 | CCAAGCUUAGUGAAGAACA | UGUUCUUCACUAAGCUUGG | 2727 | 1856 | Yes | No | No |
| 2728 | AAGCUUAGUGAAGAACUGA | UCAGUUCUUCACUAAGCUU | 2729 | 1858 | Yes | No | No |
| 2730 | AGCUUAGUGAAGAACUGUA | UACAGUUCUUCACUAAGCU | 2731 | 1859 | Yes | No | No |
| 2732 | CUUAGUGAAGAACUGUUCA | UGAACAGUUCUUCACUAAG | 2733 | 1861 | Yes | No | No |
| 2734 | AGUGAAGAACUGUUCUACA | UGUAGAACAGUUCUUCACU | 2735 | 1864 | Yes | No | No |
| 2736 | GAAGAACUGUUCUACCAGA | UCUGGUAGAACAGUUCUUC | 2737 | 1867 | Yes | No | No |
| 2738 | AAGAACUGUUCUACCAGAA | UUCUGGUAGAACAGUUCUU | 2739 | 1868 | Yes | No | No |
| 2740 | AGAACUGUUCUACCAGAUA | UAUCUGGUAGAACAGUUCU | 2741 | 1869 | Yes | No | No |
| 2742 | AACUGUUCUACCAGAUACA | UGUAUCUGGUAGAACAGUU | 2743 | 1871 | Yes | No | No |
| 2744 | ACUGUUCUACCAGAUACUA | UAGUAUCUGGUAGAACAGU | 2745 | 1872 | Yes | No | No |
| 2746 | UGUUCUACCAGAUACUCAA | UUGAGUAUCUGGUAGAACA | 2747 | 1874 | Yes | Yes | No |
| 2748 | GUUCUACCAGAUACUCAUA | UAUGAGUAUCUGGUAGAAC | 2749 | 1875 | Yes | Yes | No |
| 2750 | UCUACCAGAUACUCAUUUA | UAAAUGAGUAUCUGGUAGA | 2751 | 1877 | Yes | Yes | Yes |
| 2752 | ACCAGAUACUCAUUUAUGA | UCAUAAAUGAGUAUCUGGU | 2753 | 1880 | Yes | Yes | No |
| 2754 | CCAGAUACUCAUUUAUGAA | UUCAUAAAUGAGUAUCUGG | 2755 | 1881 | Yes | Yes | No |
| 2756 | AGAUACUCAUUUAUGAUUA | UAAUCAUAAAUGAGUAUCU | 2757 | 1883 | Yes | Yes | No |
| 2758 | GAUACUCAUUUAUGAUUUA | UAAAUCAUAAAUGAGUAUC | 2759 | 1884 | Yes | Yes | No |
| 2760 | UACUCAUUUAUGAUUUUGA | UCAAAAUCAUAAAUGAGUA | 2761 | 1886 | Yes | Yes | No |
| 2762 | CUCAUUUAUGAUUUUGCCA | UGGCAAAAUCAUAAAUGAG | 2763 | 1888 | Yes | Yes | No |
| 2764 | UCAUUUAUGAUUUUGCCAA | UUGGCAAAAUCAUAAAUGA | 2765 | 1889 | Yes | Yes | No |
| 2766 | UUAUGAUUUUGCCAAUUUA | UAAAUUGGCAAAAUCAUAA | 2767 | 1893 | Yes | No | No |
| 2768 | UGAUUUUGCCAAUUUUGGA | UCCAAAAUUGGCAAAAUCA | 2769 | 1896 | Yes | No | No |
| 2770 | AUUUUGCCAAUUUUGGUGA | UCACCAAAAUUGGCAAAAU | 2771 | 1898 | Yes | No | No |
| 2772 | UUUGCCAAUUUUGGUGUUA | UAACACCAAAAUUGGCAAA | 2773 | 1900 | Yes | No | No |
| 2774 | GCCAAUUUUGGUGUUCUCA | UGAGAACACCAAAAUUGGC | 2775 | 1903 | No | No | No |
| 2776 | CAAUUUUGGUGUUCUCAGA | UCUGAGAACACCAAAAUUG | 2777 | 1905 | No | No | No |
| 2778 | AUUUUGGUGUUCUCAGGUA | UACCUGAGAACACCAAAAU | 2779 | 1907 | No | No | No |
| 2780 | UUUUGGUGUUCUCAGGUUA | UAACCUGAGAACACCAAAA | 2781 | 1908 | No | No | No |
| 2782 | UUUGGUGUUCUCAGGUUAA | UUAACCUGAGAACACCAAA | 2783 | 1909 | No | No | No |
| 2784 | GGUGUUCUCAGGUUAUCGA | UCGAUAACCUGAGAACACC | 2785 | 1912 | No | No | No |
| 2786 | GUUCUCAGGUUAUCGGAGA | UCUCCGAUAACCUGAGAAC | 2787 | 1915 | No | No | No |
| 2788 | GAGCCAGCACCGCUCUUUA | UAAAGAGCGGUGCUGGCUC | 2789 | 1930 | No | No | No |
| 2790 | GCCAGCACCGCUCUUUGAA | UUCAAAGAGCGGUGCUGGC | 2791 | 1932 | No | No | No |
| 2792 | CCAGCACCGCUCUUUGACA | UGUCAAAGAGCGGUGCUGG | 2793 | 1933 | No | No | No |
| 2794 | CACCGCUCUUUGACCUUGA | UCAAGGUCAAAGAGCGGUG | 2795 | 1937 | No | No | No |
| 2796 | UUUGACCUUGCCAUGCUUA | UAAGCAUGGCAAGGUCAAA | 2797 | 1945 | No | No | No |
| 2798 | CUUGCCAUGCUUGCCUUAA | UUAAGGCAAGCAUGGCAAG | 2799 | 1951 | No | No | No |
| 2800 | UGCCAUGCUUGCCUUAGAA | UUCUAAGGCAAGCAUGGCA | 2801 | 1953 | No | No | No |
| 2802 | CCAUGCUUGCCUUAGAUAA | UUAUCUAAGGCAAGCAUGG | 2803 | 1955 | Yes | No | No |
| 2804 | CAUGCUUGCCUUAGAUAGA | UCUAUCUAAGGCAAGCAUG | 2805 | 1956 | Yes | No | No |
| 2806 | GCUUGCCUUAGAUAGUCCA | UGGACUAUCUAAGGCAAGC | 2807 | 1959 | Yes | No | No |
| 2808 | UUGCCUUAGAUAGUCCAGA | UCUGGACUAUCUAAGGCAA | 2809 | 1961 | Yes | No | No |
| 2810 | UGCCUUAGAUAGUCCAGAA | UUCUGGACUAUCUAAGGCA | 2811 | 1962 | Yes | No | No |
| 2812 | UUAGAUAGUCCAGAGAGUA | UACUCUCUGGACUAUCUAA | 2813 | 1966 | Yes | No | No |
| 2814 | GAGGAAGAUGGUCCCAAAA | UUUUGGGACCAUCUUCCUC | 2815 | 1993 | Yes | No | No |
| 2816 | AAGAUGGUCCCAAAGAAGA | UCUUCUUUGGGACCAUCUU | 2817 | 1997 | Yes | No | No |
| 2818 | AGAUGGUCCCAAAGAAGGA | UCCUUCUUUGGGACCAUCU | 2819 | 1998 | Yes | No | No |
| 2820 | GGUCCCAAAGAAGGACUUA | UAAGUCCUUCUUUGGGACC | 2821 | 2002 | Yes | No | No |
| 2822 | CCCAAAGAAGGACUUGCUA | UAGCAAGUCCUUCUUUGGG | 2823 | 2005 | Yes | No | No |
| 2824 | AAAGAAGGACUUGCUGAAA | UUUCAGCAAGUCCUUCUUU | 2825 | 2008 | Yes | No | No |
| 2826 | AGAAGGACUUGCUGAAUAA | UUAUUCAGCAAGUCCUUCU | 2827 | 2010 | Yes | No | No |
| 2828 | AAGGACUUGCUGAAUACAA | UUGUAUUCAGCAAGUCCUU | 2829 | 2012 | Yes | No | No |
| 2830 | AGGACUUGCUGAAUACAUA | UAUGUAUUCAGCAAGUCCU | 2831 | 2013 | Yes | No | No |
| 2832 | GGACUUGCUGAAUACAUUA | UAAUGUAUUCAGCAAGUCC | 2833 | 2014 | Yes | No | No |
| 2834 | GACUUGCUGAAUACAUUGA | UCAAUGUAUUCAGCAAGUC | 2835 | 2015 | Yes | No | No |
| 2836 | ACUUGCUGAAUACAUUGUA | UACAAUGUAUUCAGCAAGU | 2837 | 2016 | Yes | No | No |
| 2838 | CUUGCUGAAUACAUUGUUA | UAACAAUGUAUUCAGCAAG | 2839 | 2017 | Yes | No | No |
| 2840 | GCUGAAUACAUUGUUGAGA | UCUCAACAAUGUAUUCAGC | 2841 | 2020 | Yes | No | No |
| 2842 | CUGAAUACAUUGUUGAGUA | UACUCAACAAUGUAUUCAG | 2843 | 2021 | Yes | No | No |
| 2844 | UGAAUACAUUGUUGAGUUA | UAACUCAACAAUGUAUUCA | 2845 | 2022 | Yes | No | No |
| 2846 | AAUACAUUGUUGAGUUUCA | UGAAACUCAACAAUGUAUU | 2847 | 2024 | Yes | No | No |
| 2848 | UACAUUGUUGAGUUUCUGA | UCAGAAACUCAACAAUGUA | 2849 | 2026 | Yes | Yes | No |
| 2850 | UUGAGUUUCUGAAGAAGAA | UUCUUCUUCAGAAACUCAA | 2851 | 2033 | Yes | Yes | No |
| 2852 | GAGUUUCUGAAGAAGAAGA | UCUUCUUCUUCAGAAACUC | 2853 | 2035 | Yes | No | No |
| 2854 | GUUUCUGAAGAAGAAGGCA | UGCCUUCUUCUUCAGAAAC | 2855 | 2037 | Yes | No | No |
| 2856 | AGAAGGCUGAGAUGCUUGA | UCAAGCAUCUCAGCCUUCU | 2857 | 2048 | No | No | No |
| 2858 | GAAGGCUGAGAUGCUUGCA | UGCAAGCAUCUCAGCCUUC | 2859 | 2049 | No | No | No |
| 2860 | AAGGCUGAGAUGCUUGCAA | UUGCAAGCAUCUCAGCCUU | 2861 | 2050 | No | No | No |
| 2862 | GGCUGAGAUGCUUGCAGAA | UUCUGCAAGCAUCUCAGCC | 2863 | 2052 | No | No | No |
| 2864 | GCUGAGAUGCUUGCAGACA | UGUCUGCAAGCAUCUCAGC | 2865 | 2053 | No | No | No |
| 2866 | CUGAGAUGCUUGCAGACUA | UAGUCUGCAAGCAUCUCAG | 2867 | 2054 | No | No | No |
| 2868 | UGAGAUGCUUGCAGACUAA | UUAGUCUGCAAGCAUCUCA | 2869 | 2055 | No | No | No |
| 2870 | GAGAUGCUUGCAGACUAUA | UAUAGUCUGCAAGCAUCUC | 2871 | 2056 | Yes | Yes | No |
| 2872 | AUGCUUGCAGACUAUUUCA | UGAAAUAGUCUGCAAGCAU | 2873 | 2059 | Yes | Yes | Yes |
| 2874 | GCUUGCAGACUAUUUCUCA | UGAGAAAUAGUCUGCAAGC | 2875 | 2061 | Yes | Yes | Yes |
| 2876 | CUUGCAGACUAUUUCUCUA | UAGAGAAAUAGUCUGCAAG | 2877 | 2062 | Yes | Yes | Yes |
| 2878 | UUGCAGACUAUUUCUCUUA | UAAGAGAAAUAGUCUGCAA | 2879 | 2063 | Yes | No | No |
| 2880 | UGCAGACUAUUUCUCUUUA | UAAAGAGAAAUAGUCUGCA | 2881 | 2064 | Yes | No | No |
| 2882 | CAGACUAUUUCUCUUUGGA | UCCAAAGAGAAAUAGUCUG | 2883 | 2066 | Yes | No | No |
| 2884 | AUUUCUCUUUGGAAAUUGA | UCAAUUUCCAAAGAGAAAU | 2885 | 2072 | Yes | No | No |
| 2886 | AAUUGAUGAGGAAGGGAAA | UUUCCCUUCCUCAUCAAUU | 2887 | 2085 | Yes | No | Yes |
| 2888 | AUGAGGAAGGGAACCUGAA | UUCAGGUUCCCUUCCUCAU | 2889 | 2090 | Yes | Yes | Yes |
| 2890 | GAAGGGAACCUGAUUGGAA | UUCCAAUCAGGUUCCCUUC | 2891 | 2095 | Yes | Yes | Yes |
| 2892 | AAGGGAACCUGAUUGGAUA | UAUCCAAUCAGGUUCCCUU | 2893 | 2096 | Yes | Yes | Yes |
| 2894 | GGGAACCUGAUUGGAUUAA | UUAAUCCAAUCAGGUUCCC | 2895 | 2098 | Yes | Yes | Yes |
| 2896 | CCUGAUUGGAUUACCCCUA | UAGGGGUAAUCCAAUCAGG | 2897 | 2103 | Yes | No | No |
| 2898 | UUGGAUUACCCCUUCUGAA | UUCAGAAGGGGUAAUCCAA | 2899 | 2108 | Yes | No | No |
| 2900 | UGGAUUACCCCUUCUGAUA | UAUCAGAAGGGGUAAUCCA | 2901 | 2109 | Yes | No | No |
| 2902 | GGAUUACCCCUUCUGAUUA | UAAUCAGAAGGGGUAAUCC | 2903 | 2110 | Yes | No | No |
| 2904 | AUUACCCCUUCUGAUUGAA | UUCAAUCAGAAGGGGUAAU | 2905 | 2112 | Yes | No | No |
| 2906 | UACCCCUUCUGAUUGACAA | UUGUCAAUCAGAAGGGGUA | 2907 | 2114 | Yes | No | No |
| 2908 | CCUUCUGAUUGACAACUAA | UUAGUUGUCAAUCAGAAGG | 2909 | 2118 | Yes | No | No |
| 2910 | UUCUGAUUGACAACUAUGA | UCAUAGUUGUCAAUCAGAA | 2911 | 2120 | Yes | No | No |
| 2912 | UGAUUGACAACUAUGUGCA | UGCACAUAGUUGUCAAUCA | 2913 | 2123 | Yes | No | No |
| 2914 | GAUUGACAACUAUGUGCCA | UGGCACAUAGUUGUCAAUC | 2915 | 2124 | Yes | No | No |
| 2916 | CUUUGGAGGGACUGCCUAA | UUAGGCAGUCCCUCCAAAG | 2917 | 2144 | Yes | Yes | Yes |
| 2918 | UUUGGAGGGACUGCCUAUA | UAUAGGCAGUCCCUCCAAA | 2919 | 2145 | Yes | Yes | Yes |
| 2920 | UUGGAGGGACUGCCUAUCA | UGAUAGGCAGUCCCUCCAA | 2921 | 2146 | Yes | Yes | Yes |
| 2922 | UGGAGGGACUGCCUAUCUA | UAGAUAGGCAGUCCCUCCA | 2923 | 2147 | Yes | Yes | Yes |
| 2924 | GGAGGGACUGCCUAUCUUA | UAAGAUAGGCAGUCCCUCC | 2925 | 2148 | Yes | Yes | Yes |
| 2926 | GAGGGACUGCCUAUCUUCA | UGAAGAUAGGCAGUCCCUC | 2927 | 2149 | Yes | Yes | Yes |
| 2928 | GGGACUGCCUAUCUUCAUA | UAUGAAGAUAGGCAGUCCC | 2929 | 2151 | Yes | Yes | Yes |
| 2930 | GGACUGCCUAUCUUCAUUA | UAAUGAAGAUAGGCAGUCC | 2931 | 2152 | Yes | Yes | Yes |
| 2932 | ACUGCCUAUCUUCAUUCUA | UAGAAUGAAGAUAGGCAGU | 2933 | 2154 | Yes | Yes | Yes |
| 2934 | CUGCCUAUCUUCAUUCUUA | UAAGAAUGAAGAUAGGCAG | 2935 | 2155 | Yes | Yes | Yes |
| 2936 | GCCUAUCUUCAUUCUUCGA | UCGAAGAAUGAAGAUAGGC | 2937 | 2157 | Yes | Yes | Yes |
| 2938 | CCUAUCUUCAUUCUUCGAA | UUCGAAGAAUGAAGAUAGG | 2939 | 2158 | Yes | Yes | Yes |
| 2940 | CUAUCUUCAUUCUUCGACA | UGUCGAAGAAUGAAGAUAG | 2941 | 2159 | Yes | Yes | Yes |
| 2942 | UAUCUUCAUUCUUCGACUA | UAGUCGAAGAAUGAAGAUA | 2943 | 2160 | Yes | Yes | Yes |
| 2944 | AUCUUCAUUCUUCGACUAA | UUAGUCGAAGAAUGAAGAU | 2945 | 2161 | Yes | No | No |
| 2946 | AUUCUUCGACUAGCCACUA | UAGUGGCUAGUCGAAGAAU | 2947 | 2167 | Yes | No | No |
| 2948 | UCGACUAGCCACUGAGGUA | UACCUCAGUGGCUAGUCGA | 2949 | 2172 | Yes | No | No |
| 2950 | GACUAGCCACUGAGGUGAA | UUCACCUCAGUGGCUAGUC | 2951 | 2174 | No | No | No |
| 2952 | ACUAGCCACUGAGGUGAAA | UUUCACCUCAGUGGCUAGU | 2953 | 2175 | No | No | No |
| 2954 | CUAGCCACUGAGGUGAAUA | UAUUCACCUCAGUGGCUAG | 2955 | 2176 | No | No | No |
| 2956 | AGCCACUGAGGUGAAUUGA | UCAAUUCACCUCAGUGGCU | 2957 | 2178 | No | No | No |
| 2958 | GCCACUGAGGUGAAUUGGA | UCCAAUUCACCUCAGUGGC | 2959 | 2179 | No | Yes | No |
| 2960 | CCACUGAGGUGAAUUGGGA | UCCCAAUUCACCUCAGUGG | 2961 | 2180 | No | Yes | No |
| 2962 | CACUGAGGUGAAUUGGGAA | UUCCCAAUUCACCUCAGUG | 2963 | 2181 | No | Yes | No |
| 2964 | ACUGAGGUGAAUUGGGACA | UGUCCCAAUUCACCUCAGU | 2965 | 2182 | No | No | No |
| 2966 | GGUGAAUUGGGACGAAGAA | UUCUUCGUCCCAAUUCACC | 2967 | 2187 | Yes | No | No |
| 2968 | UGAAUUGGGACGAAGAAAA | UUUUCUUCGUCCCAAUUCA | 2969 | 2189 | Yes | No | No |
| 2970 | AAUUGGGACGAAGAAAAGA | UCUUUUCUUCGUCCCAAUU | 2971 | 2191 | Yes | No | No |
| 2972 | AUUGGGACGAAGAAAAGGA | UCCUUUUCUUCGUCCCAAU | 2973 | 2192 | Yes | No | No |
| 2974 | UUGGGACGAAGAAAAGGAA | UUCCUUUUCUUCGUCCCAA | 2975 | 2193 | Yes | No | No |
| 2976 | ACGAAGAAAAGGAAUGUUA | UAACAUUCCUUUUCUUCGU | 2977 | 2198 | Yes | No | No |
| 2978 | AGAAAAGGAAUGUUUUGAA | UUCAAAACAUUCCUUUUCU | 2979 | 2202 | Yes | No | No |
| 2980 | GGAAUGUUUUGAAAGCCUA | UAGGCUUUCAAAACAUUCC | 2981 | 2208 | Yes | No | No |
| 2982 | GAAUGUUUUGAAAGCCUCA | UGAGGCUUUCAAAACAUUC | 2983 | 2209 | Yes | No | No |
| 2984 | AAUGUUUUGAAAGCCUCAA | UUGAGGCUUUCAAAACAUU | 2985 | 2210 | Yes | No | No |
| 2986 | GUUUUGAAAGCCUCAGUAA | UUACUGAGGCUUUCAAAAC | 2987 | 2213 | Yes | No | No |
| 2988 | UUUUGAAAGCCUCAGUAAA | UUUACUGAGGCUUUCAAAA | 2989 | 2214 | Yes | No | No |
| 2990 | UUGAAAGCCUCAGUAAAGA | UCUUUACUGAGGCUUUCAA | 2991 | 2216 | Yes | No | No |
| 2992 | GCCUCAGUAAAGAAUGCGA | UCGCAUUCUUUACUGAGGC | 2993 | 2222 | No | No | No |
| 2994 | CUCAGUAAAGAAUGCGCUA | UAGCGCAUUCUUUACUGAG | 2995 | 2224 | No | No | No |
| 2996 | UCAGUAAAGAAUGCGCUAA | UUAGCGCAUUCUUUACUGA | 2997 | 2225 | No | No | No |
| 2998 | GUAAAGAAUGCGCUAUGUA | UACAUAGCGCAUUCUUUAC | 2999 | 2228 | No | No | No |
| 3000 | AAGAAUGCGCUAUGUUCUA | UAGAACAUAGCGCAUUCUU | 3001 | 2231 | No | No | No |
| 3002 | AGAAUGCGCUAUGUUCUAA | UUAGAACAUAGCGCAUUCU | 3003 | 2232 | No | No | No |
| 3004 | GAAUGCGCUAUGUUCUAUA | UAUAGAACAUAGCGCAUUC | 3005 | 2233 | No | No | No |
| 3006 | AAUGCGCUAUGUUCUAUUA | UAAUAGAACAUAGCGCAUU | 3007 | 2234 | No | No | No |
| 3008 | UGCGCUAUGUUCUAUUCCA | UGGAAUAGAACAUAGCGCA | 3009 | 2236 | No | No | No |
| 3010 | GCGCUAUGUUCUAUUCCAA | UUGGAAUAGAACAUAGCGC | 3011 | 2237 | No | No | No |
| 3012 | CUAUGUUCUAUUCCAUCCA | UGGAUGGAAUAGAACAUAG | 3013 | 2240 | No | No | No |
| 3014 | GUUCUAUUCCAUCCGGAAA | UUUCCGGAUGGAAUAGAAC | 3015 | 2244 | No | No | No |
| 3016 | UUCCAUCCGGAAGCAGUAA | UUACUGCUUCCGGAUGGAA | 3017 | 2250 | No | No | No |
| 3018 | UCCAUCCGGAAGCAGUACA | UGUACUGCUUCCGGAUGGA | 3019 | 2251 | Yes | No | No |
| 3020 | CAUCCGGAAGCAGUACAUA | UAUGUACUGCUUCCGGAUG | 3021 | 2253 | Yes | No | No |
| 3022 | UCCGGAAGCAGUACAUAUA | UAUAUGUACUGCUUCCGGA | 3023 | 2255 | Yes | No | No |
| 3024 | CCGGAAGCAGUACAUAUCA | UGAUAUGUACUGCUUCCGG | 3025 | 2256 | Yes | No | No |
| 3026 | CGGAAGCAGUACAUAUCUA | UAGAUAUGUACUGCUUCCG | 3027 | 2257 | Yes | No | No |
| 3028 | GGAAGCAGUACAUAUCUGA | UCAGAUAUGUACUGCUUCC | 3029 | 2258 | Yes | No | No |
| 3030 | GAAGCAGUACAUAUCUGAA | UUCAGAUAUGUACUGCUUC | 3031 | 2259 | Yes | No | No |
| 3032 | AAGCAGUACAUAUCUGAGA | UCUCAGAUAUGUACUGCUU | 3033 | 2260 | Yes | No | No |
| 3034 | AGCAGUACAUAUCUGAGGA | UCCUCAGAUAUGUACUGCU | 3035 | 2261 | Yes | No | No |
| 3036 | AGUACAUAUCUGAGGAGUA | UACUCCUCAGAUAUGUACU | 3037 | 2264 | Yes | No | No |
| 3038 | UCAGGCCAGCAGAGUGAAA | UUUCACUCUGCUGGCCUGA | 3039 | 2290 | Yes | No | No |
| 3040 | AGGCCAGCAGAGUGAAGUA | UACUUCACUCUGCUGGCCU | 3041 | 2292 | Yes | No | No |
| 3042 | GGCCAGCAGAGUGAAGUGA | UCACUUCACUCUGCUGGCC | 3043 | 2293 | Yes | No | No |
| 3044 | GCCAGCAGAGUGAAGUGCA | UGCACUUCACUCUGCUGGC | 3045 | 2294 | Yes | No | No |
| 3046 | GAAGUGCCUGGCUCCAUUA | UAAUGGAGCCAGGCACUUC | 3047 | 2305 | Yes | No | No |
| 3048 | AAGUGCCUGGCUCCAUUCA | UGAAUGGAGCCAGGCACUU | 3049 | 2306 | Yes | No | No |
| 3050 | UGCCUGGCUCCAUUCCAAA | UUUGGAAUGGAGCCAGGCA | 3051 | 2309 | Yes | No | No |
| 3052 | UCCAAACUCCUGGAAGUGA | UCACUUCCAGGAGUUUGGA | 3053 | 2322 | Yes | No | No |
| 3054 | CUGGAAGUGGACUGUGGAA | UUCCACAGUCCACUUCCAG | 3055 | 2331 | Yes | Yes | Yes |
| 3056 | GGAAGUGGACUGUGGAACA | UGUUCCACAGUCCACUUCC | 3057 | 2333 | Yes | No | Yes |
| 3058 | GAAGUGGACUGUGGAACAA | UUGUUCCACAGUCCACUUC | 3059 | 2334 | Yes | No | Yes |
| 3060 | AAGUGGACUGUGGAACACA | UGUGUUCCACAGUCCACUU | 3061 | 2335 | Yes | No | Yes |
| 3062 | AGUGGACUGUGGAACACAA | UUGUGUUCCACAGUCCACU | 3063 | 2336 | Yes | No | Yes |
| 3064 | GGACUGUGGAACACAUUGA | UCAAUGUGUUCCACAGUCC | 3065 | 2339 | Yes | No | No |
| 3066 | GACUGUGGAACACAUUGUA | UACAAUGUGUUCCACAGUC | 3067 | 2340 | Yes | No | No |
| 3068 | ACUGUGGAACACAUUGUCA | UGACAAUGUGUUCCACAGU | 3069 | 2341 | No | No | No |
| 3070 | CUGUGGAACACAUUGUCUA | UAGACAAUGUGUUCCACAG | 3071 | 2342 | No | No | No |
| 3072 | GUGGAACACAUUGUCUAUA | UAUAGACAAUGUGUUCCAC | 3073 | 2344 | No | No | No |
| 3074 | UGGAACACAUUGUCUAUAA | UUAUAGACAAUGUGUUCCA | 3075 | 2345 | No | No | No |
| 3076 | AACACAUUGUCUAUAAAGA | UCUUUAUAGACAAUGUGUU | 3077 | 2348 | No | No | No |
| 3078 | ACACAUUGUCUAUAAAGCA | UGCUUUAUAGACAAUGUGU | 3079 | 2349 | No | No | No |
| 3080 | CACAUUGUCUAUAAAGCCA | UGGCUUUAUAGACAAUGUG | 3081 | 2350 | No | No | No |
| 3082 | ACAUUGUCUAUAAAGCCUA | UAGGCUUUAUAGACAAUGU | 3083 | 2351 | No | No | No |
| 3084 | GCCUUGCGCUCACACAUUA | UAAUGUGUGAGCGCAAGGC | 3085 | 2365 | Yes | No | No |
| 3086 | CCUUGCGCUCACACAUUCA | UGAAUGUGUGAGCGCAAGG | 3087 | 2366 | Yes | No | No |
| 3088 | CUUGCGCUCACACAUUCUA | UAGAAUGUGUGAGCGCAAG | 3089 | 2367 | Yes | No | No |
| 3090 | UGCGCUCACACAUUCUGCA | UGCAGAAUGUGUGAGCGCA | 3091 | 2369 | Yes | No | No |
| 3092 | CGCUCACACAUUCUGCCUA | UAGGCAGAAUGUGUGAGCG | 3093 | 2371 | Yes | No | No |
| 3094 | CACAUUCUGCCUCCUAAAA | UUUUAGGAGGCAGAAUGUG | 3095 | 2377 | Yes | No | No |
| 3096 | CAUUCUGCCUCCUAAACAA | UUGUUUAGGAGGCAGAAUG | 3097 | 2379 | Yes | No | No |
| 3098 | UUCUGCCUCCUAAACAUUA | UAAUGUUUAGGAGGCAGAA | 3099 | 2381 | Yes | No | No |
| 3100 | UCUGCCUCCUAAACAUUUA | UAAAUGUUUAGGAGGCAGA | 3101 | 2382 | Yes | No | No |
| 3102 | CAGAAGAUGGAAAUAUCCA | UGGAUAUUUCCAUCUUCUG | 3103 | 2402 | Yes | No | No |
| 3104 | AAGAUGGAAAUAUCCUGCA | UGCAGGAUAUUUCCAUCUU | 3105 | 2405 | Yes | No | No |
| 3106 | AGAUGGAAAUAUCCUGCAA | UUGCAGGAUAUUUCCAUCU | 3107 | 2406 | Yes | No | No |
| 3108 | GGAAAUAUCCUGCAGCUUA | UAAGCUGCAGGAUAUUUCC | 3109 | 2410 | No | No | No |
| 3110 | AAUAUCCUGCAGCUUGCUA | UAGCAAGCUGCAGGAUAUU | 3111 | 2413 | No | No | No |
| 3112 | AUAUCCUGCAGCUUGCUAA | UUAGCAAGCUGCAGGAUAU | 3113 | 2414 | No | No | No |
| 3114 | UAUCCUGCAGCUUGCUAAA | UUUAGCAAGCUGCAGGAUA | 3115 | 2415 | No | No | No |
| 3116 | CCUGCAGCUUGCUAACCUA | UAGGUUAGCAAGCUGCAGG | 3117 | 2418 | No | No | No |
| 3118 | GCUAACCUGCCUGAUCUAA | UUAGAUCAGGCAGGUUAGC | 3119 | 2428 | Yes | No | No |
| 3120 | CUAACCUGCCUGAUCUAUA | UAUAGAUCAGGCAGGUUAG | 3121 | 2429 | Yes | No | No |
| 3122 | UAACCUGCCUGAUCUAUAA | UUAUAGAUCAGGCAGGUUA | 3123 | 2430 | Yes | No | No |
| 3124 | CCUGCCUGAUCUAUACAAA | UUUGUAUAGAUCAGGCAGG | 3125 | 2433 | Yes | No | No |
| 3126 | CUGCCUGAUCUAUACAAAA | UUUUGUAUAGAUCAGGCAG | 3127 | 2434 | Yes | No | No |
| 3128 | UGCCUGAUCUAUACAAAGA | UCUUUGUAUAGAUCAGGCA | 3129 | 2435 | Yes | No | No |
| 3130 | GCCUGAUCUAUACAAAGUA | UACUUUGUAUAGAUCAGGC | 3131 | 2436 | Yes | No | No |
| 3132 | CCUGAUCUAUACAAAGUCA | UGACUUUGUAUAGAUCAGG | 3133 | 2437 | Yes | No | No |
| 3134 | UGAUCUAUACAAAGUCUUA | UAAGACUUUGUAUAGAUCA | 3135 | 2439 | Yes | No | No |
| 3136 | AUCUAUACAAAGUCUUUGA | UCAAAGACUUUGUAUAGAU | 3137 | 2441 | Yes | Yes | No |
| 3138 | UCUAUACAAAGUCUUUGAA | UUCAAAGACUUUGUAUAGA | 3139 | 2442 | Yes | Yes | No |
| 3140 | CUAUACAAAGUCUUUGAGA | UCUCAAAGACUUUGUAUAG | 3141 | 2443 | Yes | Yes | No |
| 3142 | UAUACAAAGUCUUUGAGAA | UUCUCAAAGACUUUGUAUA | 3143 | 2444 | Yes | No | No |
| 3144 | UACAAAGUCUUUGAGAGGA | UCCUCUCAAAGACUUUGUA | 3145 | 2446 | Yes | No | No |
| 3146 | ACAAAGUCUUUGAGAGGUA | UACCUCUCAAAGACUUUGU | 3147 | 2447 | Yes | No | No |
| 3148 | AAAGUCUUUGAGAGGUGUA | UACACCUCUCAAAGACUUU | 3149 | 2449 | Yes | No | No |
| 3150 | AAGUCUUUGAGAGGUGUUA | UAACACCUCUCAAAGACUU | 3151 | 2450 | Yes | No | No |
| 3152 | AGUCUUUGAGAGGUGUUAA | UUAACACCUCUCAAAGACU | 3153 | 2451 | Yes | No | No |
| 3154 | GUCUUUGAGAGGUGUUAAA | UUUAACACCUCUCAAAGAC | 3155 | 2452 | Yes | No | No |
| 3156 | UCUUUGAGAGGUGUUAAAA | UUUUAACACCUCUCAAAGA | 3157 | 2453 | Yes | No | No |
| 3158 | UUGAGAGGUGUUAAAUAUA | UAUAUUUAACACCUCUCAA | 3159 | 2456 | Yes | No | No |
| 3160 | UGAGAGGUGUUAAAUAUGA | UCAUAUUUAACACCUCUCA | 3161 | 2457 | Yes | No | No |
| 3162 | GAGAGGUGUUAAAUAUGGA | UCCAUAUUUAACACCUCUC | 3163 | 2458 | Yes | No | No |
| 3164 | AGAGGUGUUAAAUAUGGUA | UACCAUAUUUAACACCUCU | 3165 | 2459 | Yes | No | No |
| 3166 | GAGGUGUUAAAUAUGGUUA | UAACCAUAUUUAACACCUC | 3167 | 2460 | No | No | No |
| 3168 | AGGUGUUAAAUAUGGUUAA | UUAACCAUAUUUAACACCU | 3169 | 2461 | No | No | No |
| 3170 | GGUGUUAAAUAUGGUUAUA | UAUAACCAUAUUUAACACC | 3171 | 2462 | No | No | No |
| 3172 | UGUUAAAUAUGGUUAUUUA | UAAAUAACCAUAUUUAACA | 3173 | 2464 | No | No | No |
| 3174 | UAUGGUUAUUUAUGCACUA | UAGUGCAUAAAUAACCAUA | 3175 | 2471 | No | No | No |
| 3176 | AUGGUUAUUUAUGCACUGA | UCAGUGCAUAAAUAACCAU | 3177 | 2472 | No | No | No |
| 3178 | UGGUUAUUUAUGCACUGUA | UACAGUGCAUAAAUAACCA | 3179 | 2473 | No | No | No |
| 3180 | UUAUGCACUGUGGGAUGUA | UACAUCCCACAGUGCAUAA | 3181 | 2480 | Yes | No | No |
| 3182 | CACUGUGGGAUGUGUUCUA | UAGAACACAUCCCACAGUG | 3183 | 2485 | No | No | No |
| 3184 | CUGUGGGAUGUGUUCUUCA | UGAAGAACACAUCCCACAG | 3185 | 2487 | No | No | No |
| 3186 | UGUGGGAUGUGUUCUUCUA | UAGAAGAACACAUCCCACA | 3187 | 2488 | No | No | No |
| 3188 | GUGGGAUGUGUUCUUCUUA | UAAGAAGAACACAUCCCAC | 3189 | 2489 | No | No | No |
| 3190 | UGGGAUGUGUUCUUCUUUA | UAAAGAAGAACACAUCCCA | 3191 | 2490 | No | No | No |
| 3192 | GGGAUGUGUUCUUCUUUCA | UGAAAGAAGAACACAUCCC | 3193 | 2491 | No | No | No |
| 3194 | GGAUGUGUUCUUCUUUCUA | UAGAAAGAAGAACACAUCC | 3195 | 2492 | No | No | No |
| 3196 | GAUGUGUUCUUCUUUCUCA | UGAGAAAGAAGAACACAUC | 3197 | 2493 | No | No | No |
| 3198 | UGUGUUCUUCUUUCUCUGA | UCAGAGAAAGAAGAACACA | 3199 | 2495 | No | No | No |
| 3200 | GUGUUCUUCUUUCUCUGUA | UACAGAGAAAGAAGAACAC | 3201 | 2496 | No | No | No |
| 3202 | UGUUCUUCUUUCUCUGUAA | UUACAGAGAAAGAAGAACA | 3203 | 2497 | No | No | No |
| 3204 | UUCUUUCUCUGUAUUCCGA | UCGGAAUACAGAGAAAGAA | 3205 | 2502 | Yes | No | No |
| 3206 | UCUUUCUCUGUAUUCCGAA | UUCGGAAUACAGAGAAAGA | 3207 | 2503 | Yes | No | No |
| 3208 | UUUCUCUGUAUUCCGAUAA | UUAUCGGAAUACAGAGAAA | 3209 | 2505 | Yes | No | No |
| 3210 | UUCUCUGUAUUCCGAUACA | UGUAUCGGAAUACAGAGAA | 3211 | 2506 | Yes | No | No |
| 3212 | UCUCUGUAUUCCGAUACAA | UUGUAUCGGAAUACAGAGA | 3213 | 2507 | Yes | No | No |
| 3214 | CUCUGUAUUCCGAUACAAA | UUUGUAUCGGAAUACAGAG | 3215 | 2508 | Yes | No | No |
| 3216 | UGUAUUCCGAUACAAAGUA | UACUUUGUAUCGGAAUACA | 3217 | 2511 | Yes | No | No |
| 3218 | UAUUCCGAUACAAAGUGUA | UACACUUUGUAUCGGAAUA | 3219 | 2513 | Yes | No | No |
| 3220 | UUCCGAUACAAAGUGUUGA | UCAACACUUUGUAUCGGAA | 3221 | 2515 | Yes | No | No |
| 3222 | CCGAUACAAAGUGUUGUAA | UUACAACACUUUGUAUCGG | 3223 | 2517 | Yes | No | No |
| 3224 | GAUACAAAGUGUUGUAUCA | UGAUACAACACUUUGUAUC | 3225 | 2519 | Yes | No | No |
| 3226 | AUACAAAGUGUUGUAUCAA | UUGAUACAACACUUUGUAU | 3227 | 2520 | Yes | No | No |
| 3228 | ACAAAGUGUUGUAUCAAAA | UUUUGAUACAACACUUUGU | 3229 | 2522 | Yes | No | No |
| 3230 | CAAAGUGUUGUAUCAAAGA | UCUUUGAUACAACACUUUG | 3231 | 2523 | Yes | No | No |
| 3232 | AAAGUGUUGUAUCAAAGUA | UACUUUGAUACAACACUUU | 3233 | 2524 | Yes | No | No |
| 3234 | AAGUGUUGUAUCAAAGUGA | UCACUUUGAUACAACACUU | 3235 | 2525 | Yes | No | No |
| 3236 | AGUGUUGUAUCAAAGUGUA | UACACUUUGAUACAACACU | 3237 | 2526 | Yes | No | No |
| 3238 | UUGUAUCAAAGUGUGAUAA | UUAUCACACUUUGAUACAA | 3239 | 2530 | No | No | No |
| 3240 | AUCAAAGUGUGAUAUACAA | UUGUAUAUCACACUUUGAU | 3241 | 2534 | No | No | No |
| 3242 | AAGUGUGAUAUACAAAGUA | UACUUUGUAUAUCACACUU | 3243 | 2538 | No | No | No |
| 3244 | GAUAUACAAAGUGUACCAA | UUGGUACACUUUGUAUAUC | 3245 | 2544 | No | No | No |
| 3246 | AUAUACAAAGUGUACCAAA | UUUGGUACACUUUGUAUAU | 3247 | 2545 | No | No | No |
| 3248 | UAUACAAAGUGUACCAACA | UGUUGGUACACUUUGUAUA | 3249 | 2546 | Yes | No | No |
| 3250 | AUACAAAGUGUACCAACAA | UUGUUGGUACACUUUGUAU | 3251 | 2547 | No | No | No |
| 3252 | AGUGUACCAACAUAAGUGA | UCACUUAUGUUGGUACACU | 3253 | 2553 | No | No | No |
| 3254 | UGUACCAACAUAAGUGUUA | UAACACUUAUGUUGGUACA | 3255 | 2555 | No | No | No |
| 3256 | GUACCAACAUAAGUGUUGA | UCAACACUUAUGUUGGUAC | 3257 | 2556 | No | No | No |
| 3258 | UACCAACAUAAGUGUUGGA | UCCAACACUUAUGUUGGUA | 3259 | 2557 | No | No | No |
| 3260 | ACCAACAUAAGUGUUGGUA | UACCAACACUUAUGUUGGU | 3261 | 2558 | No | No | No |
| 3262 | CAACAUAAGUGUUGGUAGA | UCUACCAACACUUAUGUUG | 3263 | 2560 | No | No | No |
| 3264 | UAAGUGUUGGUAGCACUUA | UAAGUGCUACCAACACUUA | 3265 | 2565 | Yes | No | No |
| 3266 | GUGUUGGUAGCACUUAAGA | UCUUAAGUGCUACCAACAC | 3267 | 2568 | Yes | No | No |
| 3268 | UUGGUAGCACUUAAGACUA | UAGUCUUAAGUGCUACCAA | 3269 | 2571 | Yes | No | No |
| 3270 | UGGUAGCACUUAAGACUUA | UAAGUCUUAAGUGCUACCA | 3271 | 2572 | Yes | No | No |
| 3272 | GGUAGCACUUAAGACUUAA | UUAAGUCUUAAGUGCUACC | 3273 | 2573 | Yes | No | No |
| 3274 | GCACUUAAGACUUAUACUA | UAGUAUAAGUCUUAAGUGC | 3275 | 2577 | Yes | No | No |
| 3276 | CACUUAAGACUUAUACUUA | UAAGUAUAAGUCUUAAGUG | 3277 | 2578 | Yes | No | No |
| 3278 | CUUAAGACUUAUACUUGCA | UGCAAGUAUAAGUCUUAAG | 3279 | 2580 | Yes | No | No |
| 3280 | UUAAGACUUAUACUUGCCA | UGGCAAGUAUAAGUCUUAA | 3281 | 2581 | Yes | No | No |
| 3282 | UAAGACUUAUACUUGCCUA | UAGGCAAGUAUAAGUCUUA | 3283 | 2582 | Yes | No | No |
| 3284 | AAGACUUAUACUUGCCUUA | UAAGGCAAGUAUAAGUCUU | 3285 | 2583 | Yes | No | No |
| 3286 | AGACUUAUACUUGCCUUCA | UGAAGGCAAGUAUAAGUCU | 3287 | 2584 | Yes | No | No |
| 3288 | GACUUAUACUUGCCUUCUA | UAGAAGGCAAGUAUAAGUC | 3289 | 2585 | Yes | No | No |
| 3290 | CUUAUACUUGCCUUCUGAA | UUCAGAAGGCAAGUAUAAG | 3291 | 2587 | No | No | No |
| 3292 | UACUUGCCUUCUGAUAGUA | UACUAUCAGAAGGCAAGUA | 3293 | 2591 | No | No | No |
| 3294 | ACUUGCCUUCUGAUAGUAA | UUACUAUCAGAAGGCAAGU | 3295 | 2592 | No | No | No |
| 3296 | UGCCUUCUGAUAGUAUUCA | UGAAUACUAUCAGAAGGCA | 3297 | 2595 | No | No | No |
| 3298 | CUUCUGAUAGUAUUCCUUA | UAAGGAAUACUAUCAGAAG | 3299 | 2598 | No | No | No |
| 3300 | CUGAUAGUAUUCCUUUAUA | UAUAAAGGAAUACUAUCAG | 3301 | 2601 | No | No | No |
| 3302 | UGAUAGUAUUCCUUUAUAA | UUAUAAAGGAAUACUAUCA | 3303 | 2602 | No | No | No |
| 3304 | GAUAGUAUUCCUUUAUACA | UGUAUAAAGGAAUACUAUC | 3305 | 2603 | No | No | No |
| 3306 | AUAGUAUUCCUUUAUACAA | UUGUAUAAAGGAAUACUAU | 3307 | 2604 | No | No | No |
| 3308 | UAGUAUUCCUUUAUACACA | UGUGUAUAAAGGAAUACUA | 3309 | 2605 | No | No | No |
| 3310 | AGUAUUCCUUUAUACACAA | UUGUGUAUAAAGGAAUACU | 3311 | 2606 | No | No | No |
| 3312 | GUAUUCCUUUAUACACAGA | UCUGUGUAUAAAGGAAUAC | 3313 | 2607 | No | No | No |
| 3314 | CCUUUAUACACAGUGGAUA | UAUCCACUGUGUAUAAAGG | 3315 | 2612 | No | No | No |
| 3316 | CUUUAUACACAGUGGAUUA | UAAUCCACUGUGUAUAAAG | 3317 | 2613 | No | No | No |
| 3318 | UUUAUACACAGUGGAUUGA | UCAAUCCACUGUGUAUAAA | 3319 | 2614 | No | No | No |
| 3320 | UUAUACACAGUGGAUUGAA | UUCAAUCCACUGUGUAUAA | 3321 | 2615 | No | No | No |
| 3322 | UAUACACAGUGGAUUGAUA | UAUCAAUCCACUGUGUAUA | 3323 | 2616 | No | No | No |
| 3324 | AUACACAGUGGAUUGAUUA | UAAUCAAUCCACUGUGUAU | 3325 | 2617 | No | No | No |
| 3326 | CACAGUGGAUUGAUUAUAA | UUAUAAUCAAUCCACUGUG | 3327 | 2620 | No | No | No |
| 3328 | ACAGUGGAUUGAUUAUAAA | UUUAUAAUCAAUCCACUGU | 3329 | 2621 | No | No | No |
| 3330 | CAGUGGAUUGAUUAUAAAA | UUUUAUAAUCAAUCCACUG | 3331 | 2622 | No | No | No |
| 3332 | AGUGGAUUGAUUAUAAAUA | UAUUUAUAAUCAAUCCACU | 3333 | 2623 | No | No | No |
| 3334 | UUGAUUAUAAAUAAAUAGA | UCUAUUUAUUUAUAAUCAA | 3335 | 2629 | No | No | No |
| 3336 | GAUUAUAAAUAAAUAGAUA | UAUCUAUUUAUUUAUAAUC | 3337 | 2631 | No | No | No |
| 3338 | UUAUAAAUAAAUAGAUGUA | UACAUCUAUUUAUUUAUAA | 3339 | 2633 | No | No | No |
| 3340 | AAUAAAUAGAUGUGUCUUA | UAAGACACAUCUAUUUAUU | 3341 | 2638 | No | No | No |
| 3342 | AUAAAUAGAUGUGUCUUAA | UUAAGACACAUCUAUUUAU | 3343 | 2639 | No | No | No |
| 3344 | UAAAUAGAUGUGUCUUAAA | UUUAAGACACAUCUAUUUA | 3345 | 2640 | No | No | No |
| 3346 | AAAUAGAUGUGUCUUAACA | UGUUAAGACACAUCUAUUU | 3347 | 2641 | No | No | No |
| 3348 | AAUAGAUGUGUCUUAACAA | UUGUUAAGACACAUCUAUU | 3349 | 2642 | No | No | No |
| 3350 | AUAGAUGUGUCUUAACAUA | UAUGUUAAGACACAUCUAU | 3351 | 2643 | No | No | No |
| 3352 | UAGAUGUGUCUUAACAUAA | UUAUGUUAAGACACAUCUA | 3353 | 2644 | No | No | No |

TABLE 5
Sense strands with cross-species compatibility with Human and Cyno MLH1
SENSE STRAND SEQ ID NOS

1394, 1396, 1398, 1400, 1402, 1404, 1406, 1408, 1410, 1412, 1414, 1416, 1418, 1420, 1422, 1424,
1482, 1484, 1486, 1488, 1490, 1492, 1494, 1496, 1498, 1510, 1512, 1514, 1516, 1518, 1520, 1522,
1524, 1526, 1528, 1530, 1532, 1534, 1536, 1538, 1540, 1542, 1544, 1546, 1548, 1550, 1552, 1554,
1556, 1558, 1560, 1562, 1564, 1566, 1568, 1570, 1572, 1574, 1576, 1578, 1580, 1582, 1584, 1586,
1588, 1590, 1592, 1594, 1596, 1598, 1600, 1602, 1604, 1606, 1608, 1610, 1612, 1614, 1616, 1618,
1620, 1622, 1624, 1626, 1628, 1630, 1632, 1634, 1636, 1642, 1644, 1646, 1648, 1650, 1652, 1654,
1656, 1658, 1660, 1662, 1664, 1666, 1668, 1670, 1694, 1696, 1698, 1700, 1702, 1704, 1706, 1708,
1710, 1712, 1714, 1716, 1718, 1720, 1722, 1724, 1726, 1728, 1730, 1732, 1734, 1736, 1738, 1740,
1742, 1744, 1746, 1748, 1750, 1752, 1754, 1756, 1758, 1760, 1762, 1764, 1766, 1768, 1770, 1772,
1774, 1776, 1778, 1780, 1782, 1806, 1808, 1810, 1812, 1814, 1816, 1818, 1820, 1822, 1824, 1826,
1828, 1830, 1832, 1834, 1836, 1838, 1840, 1842, 1844, 1846, 1862, 1864, 1866, 1868, 1870, 1872,
1874, 1876, 1878, 1880, 1882, 1884, 1886, 1888, 1890, 1892, 1894, 1896, 1926, 1928, 1930, 1932,
1934, 1936, 1938, 1940, 1950, 1952, 1954, 1956, 1958, 1960, 1962, 1964, 1966, 1968, 1970, 1972,
1974, 1976, 1978, 1980, 1998, 2000, 2002, 2004, 2006, 2008, 2010, 2012, 2014, 2016, 2018, 2020,
2022, 2024, 2026, 2028, 2030, 2032, 2034, 2036, 2038, 2040, 2042, 2044, 2046, 2048, 2050, 2052,
2054, 2056, 2058, 2060, 2062, 2064, 2066, 2068, 2070, 2072, 2074, 2076, 2078, 2080, 2082, 2084,
2086, 2088, 2090, 2092, 2114, 2116, 2118, 2120, 2122, 2124, 2126, 2128, 2150, 2152, 2154, 2156,
2158, 2160, 2162, 2164, 2166, 2168, 2170, 2172, 2174, 2176, 2178, 2180, 2182, 2184, 2186, 2188,
2190, 2192, 2194, 2196, 2198, 2200, 2202, 2204, 2206, 2208, 2210, 2224, 2226, 2228, 2230, 2232,
2234, 2236, 2238, 2240, 2242, 2244, 2246, 2248, 2250, 2252, 2254, 2256, 2258, 2260, 2262, 2264,
2266, 2268, 2270, 2272, 2274, 2276, 2278, 2280, 2282, 2284, 2286, 2288, 2290, 2292, 2294, 2296,
2298, 2300, 2302, 2304, 2308, 2310, 2312, 2314, 2316, 2318, 2320, 2322, 2324, 2326, 2328, 2330,
2332, 2334, 2336, 2338, 2340, 2342, 2344, 2346, 2348, 2350, 2352, 2354, 2356, 2358, 2360, 2362,
2364, 2366, 2368, 2370, 2372, 2394, 2396, 2398, 2420, 2422, 2424, 2426, 2428, 2430, 2432, 2434,
2436, 2438, 2440, 2442, 2444, 2446, 2448, 2450, 2452, 2454, 2456, 2458, 2460, 2462, 2464, 2466,
2486, 2488, 2490, 2492, 2494, 2496, 2498, 2500, 2502, 2504, 2506, 2508, 2510, 2512, 2536, 2538,
2540, 2542, 2544, 2546, 2548, 2550, 2552, 2554, 2556, 2558, 2560, 2562, 2564, 2566, 2568, 2570,
2572, 2574, 2576, 2578, 2580, 2582, 2584, 2586, 2588, 2590, 2592, 2594, 2596, 2598, 2600, 2602,
2604, 2606, 2608, 2610, 2612, 2614, 2616, 2618, 2620, 2622, 2624, 2626, 2628, 2630, 2632, 2634,
2664, 2666, 2668, 2670, 2672, 2674, 2676, 2678, 2680, 2720, 2722, 2724, 2726, 2728, 2730, 2732,
2734, 2736, 2738, 2740, 2742, 2744, 2746, 2748, 2750, 2752, 2754, 2756, 2758, 2760, 2762, 2764,
2766, 2768, 2770, 2772, 2802, 2804, 2806, 2808, 2810, 2812, 2814, 2816, 2818, 2820, 2822, 2824,
2826, 2828, 2830, 2832, 2834, 2836, 2838, 2840, 2842, 2844, 2846, 2848, 2850, 2852, 2854, 2870,
2872, 2874, 2876, 2878, 2880, 2882, 2884, 2886, 2888, 2890, 2892, 2894, 2896, 2898, 2900, 2902,
2904, 2906, 2908, 2910, 2912, 2914, 2916, 2918, 2920, 2922, 2924, 2926, 2928, 2930, 2932, 2934,
2936, 2938, 2940, 2942, 2944, 2946, 2948, 2966, 2968, 2970, 2972, 2974, 2976, 2978, 2980, 2982,
2984, 2986, 2988, 2990, 3018, 3020, 3022, 3024, 3026, 3028, 3030, 3032, 3034, 3036, 3038, 3040,
3042, 3044, 3046, 3048, 3050, 3052, 3054, 3056, 3058, 3060, 3062, 3064, 3066, 3084, 3086, 3088,
3090, 3092, 3094, 3096, 3098, 3100, 3102, 3104, 3106, 3118, 3120, 3122, 3124, 3126, 3128, 3130,
3132, 3134, 3136, 3138, 3140, 3142, 3144, 3146, 3148, 3150, 3152, 3154, 3156, 3158, 3160, 3162,
3164, 3180, 3204, 3206, 3208, 3210, 3212, 3214, 3216, 3218, 3220, 3222, 3224, 3226, 3228, 3230,
3232, 3234, 3236, 3248, 3264, 3266, 3268, 3270, 3272, 3274, 3276, 3278, 3280, 3282, 3284, 3286,
3288

TABLE 6
Sense strands with cross-species compatibility with Human and Mouse MLH1
SENSE STRAND SEQ ID NOS

1558, 1578, 1636, 1716, 1718, 1720, 1722, 1724, 1726, 1728, 1730, 1732, 1734, 1736, 1738, 1740,
1742, 1744, 1746, 1838, 1840, 1842, 1844, 1846, 1902, 1904, 1906, 1908, 1910, 1940, 2006, 2008,
2010, 2012, 2042, 2044, 2046, 2048, 2078, 2080, 2224, 2226, 2228, 2230, 2232, 2234, 2236, 2238,
2240, 2324, 2326, 2560, 2674, 2676, 2678, 2680, 2746, 2748, 2750, 2752, 2754, 2756, 2758, 2760,
2762, 2764, 2848, 2850, 2870, 2872, 2874, 2876, 2888, 2890, 2892, 2894, 2916, 2918, 2920, 2922,
2924, 2926, 2928, 2930, 2932, 2934, 2936, 2938, 2940, 2942, 2958, 2960, 2962, 3054, 3136, 3138,
3140

TABLE 7
Sense strands with cross-species compatibility with Human and Rat MLH1
SENSE STRAND SEQ ID NOS

1558, 1578, 1636, 1832, 1834, 1836, 1838, 1840, 1842, 1844, 1846, 1906, 2006, 2008, 2010,
2012, 2014, 2016, 2018, 2020, 2022, 2024, 2026, 2028, 2030, 2032, 2034, 2036, 2038, 2040, 2078,
2080, 2124, 2126, 2128, 2130, 2132, 2236, 2308, 2310, 2634, 2674, 2676, 2678, 2680, 2750, 2872,
2874, 2876, 2886, 2888, 2890, 2892, 2894, 2916, 2918, 2920, 2922, 2924, 2926, 2928, 2930, 2932,
2934, 2936, 2938, 2940, 2942, 3054, 3056, 3058, 3060, 3062

TABLE 8
Sense strands with cross-species compatibility with Human, Cyno, and Mouse MLH1
SENSE STRAND SEQ ID NOS

1558, 1578, 1636, 1716, 1718, 1720, 1722, 1724, 1726, 1728, 1730, 1732, 1734, 1736, 1738, 1740,
1742, 1744, 1746, 1838, 1840, 1842, 1844, 1846, 1940, 2006, 2008, 2010, 2012, 2042, 2044, 2046,
2048, 2078, 2080, 2224, 2226, 2228, 2230, 2232, 2234, 2236, 2238, 2240, 2324, 2326, 2560, 2674,
2676, 2678, 2680, 2746, 2748, 2750, 2752, 2754, 2756, 2758, 2760, 2762, 2764, 2848, 2850, 2870,
2872, 2874, 2876, 2888, 2890, 2892, 2894, 2916, 2918, 2920, 2922, 2924, 2926, 2928, 2930, 2932,
2934, 2936, 2938, 2940, 2942, 3054, 3136, 3138, 3140

TABLE 9
Sense strands with cross-species compatibility with Human, Cyno, and Rat MLH1
SENSE STRAND SEQ ID NOS

1558, 1578, 1636, 1832, 1834, 1836, 1838, 1840, 1842, 1844, 1846, 2006, 2008, 2010, 2012, 2014,
2016, 2018, 2020, 2022, 2024, 2026, 2028, 2030, 2032, 2034, 2036, 2038, 2040, 2078, 2080, 2124,
2126, 2128, 2236, 2308, 2310, 2634, 2674, 2676, 2678, 2680, 2750, 2872, 2874, 2876, 2886, 2888,
2890, 2892, 2894, 2916, 2918, 2920, 2922, 2924, 2926, 2928, 2930, 2932, 2934, 2936, 2938, 2940,
2942, 3054, 3056, 3058, 3060, 3062

TABLE 10
Sense strands with cross-species compatibility with Human, Mouse, and Rat MLH1
SENSE STRAND SEQ ID NOS

1558, 1578, 1636, 1838, 1840, 1842, 1844, 1846, 1906, 2006, 2008, 2010, 2012, 2078, 2080, 2236,
2674, 2676, 2678, 2680, 2750, 2872, 2874, 2876, 2888, 2890, 2892, 2894, 2916, 2918, 2920, 2922,
2924, 2926, 2928, 2930, 2932, 2934, 2936, 2938, 2940, 2942, 3054

TABLE 11
Sense strands with cross-species compatibility with Human, Cyno, Mouse, and Rat MLH1
SENSE STRAND SEQ ID NOS

1558, 1578, 1636, 1838, 1840, 1842, 1844, 1846, 2006, 2008, 2010, 2012, 2078, 2080, 2236, 2674,
2676, 2678, 2680, 2750, 2872, 2874, 2876, 2888, 2890, 2892, 2894, 2916, 2918, 2920, 2922, 2924,
2926, 2928, 2930, 2932, 2934, 2936, 2938, 2940, 2942, 3054

### Example 2. Antisense Inhibition of MLH1

[0415] Inhibition or knockdown of MLH1 can be demonstrated using a cell-based assay. For example, HEK293, NIH3T3, or Hela or another available mammalian cell line with oligonucleotides targeting MLH1 identified above in Example 1 using at least five different dose levels, using transfection reagents such as lipofectamine 2000 (Invitrogen) following the manufacturer's instructions. Cells are harvested at multiple time points up to 7 days post transfection for either mRNA or protein analyses. Knockdown of mRNA and protein are determined by RT-qPCR or western blot analyses respectively, using standard molecular biology techniques as previously described (see, for example, as described in Drouet et al., 2014, PLOS One 9(6): e99341). The relative levels of the MLH1 mRNA and protein at the different oligonucleotide levels are compared with a mock oligonucleotide control. The most potent oligonucleotides (for example, those which are capable of at least 90%, at least 95%, at least 97%, at least 98%, or at least 99% or more, reduction in protein levels when compared with controls) are selected for subsequent studies, for example, as described in the examples below.

### Human Cell Lines

[0416] HeLa cells were obtained from ATCC (ATCC in partnership with LGC Standards, Wesel, Germany, cat. #ATCC-CRM-CCL-2) and cultured in HAM's F12 (#FG0815, Biochrom, Berlin, Germany), supplemented to contain 10% fetal calf serum (1248D, Biochrom GmbH, Berlin, Germany), and 100 U/ml Penicillin/100 μg/ml Streptomycin (A2213, Biochrom GmbH, Berlin, Germany) at 37° C. in an atmosphere with 5% CO₂ in a humidified incubator. For transfection of HeLa cells with ASOs, cells were seeded at a density of 15,000 cells/well into 96-well tissue culture plates (#655180, GBO, Germany).

### Transfections

[0417] In HeLa cells, transfection of ASOs was carried out with Lipofectamine 2000 (Invitrogen/Life Technologies, Karlsruhe, Germany) according to manufacturer's instructions for reverse transfection with 0.25 μL Lipofectamine 2000 per well.

[0418] The dual dose screen was performed with ASOs in quadruplicates at 20 nM and 2 nM respectively, with two ASOs targeting AHSA1 (one MOE-ASO and one 2′oMe-ASO) as unspecific controls and a mock transfection. Dose-response experiments were done with ASOs in 5 concentrations transfected in quadruplicates, starting at 20 nM in 5-6-fold dilutions steps down to ˜15-32 pM. Mock transfected cells served as control in dose-response curve (DRC) experiments.

### Analysis and Quantitation

[0419] After 24 h of incubation with ASOs, medium was removed and cells were lysed in 150 μl Medium-Lysis Mixture (1 volume lysis mixture, 2 volumes cell culture medium) and then incubated at 53° C. for 30 minutes. bDNA assay was performed according to manufacturer's instructions. Luminescence was read using 1420 Luminescence Counter (WALLAC VICTOR Light, Perkin Elmer, Rodgau-Jugesheim, Germany) following 30 minutes incubation at RT in the dark.

[0420] The two Ahsa1-ASOs (one 2′-OMe and one MOE-modified) served at the same time as unspecific controls for respective target mRNA expression and as a positive control to analyze transfection efficiency with regards to Ahsa1 mRNA level. By hybridization with an Ahsa1 probeset, the mock transfected wells served as controls for Ahsa1 mRNA level. Transfection efficiency for each 96-well plate and both doses in the dual dose screen were calculated by relating Ahsa1-level with Ahsa1-ASO (normalized to GAPDH) to Ahsa1-level obtained with mock controls.

[0421] For each well, the target mRNA level was normalized to the respective GAPDH mRNA level. The activity of a given ASO was expressed as percent mRNA concentration of the respective target (normalized to GAPDH mRNA) in treated cells, relative to the target mRNA concentration (normalized to GAPDH mRNA) averaged across control wells.

[0422] The results of the dual-dose screen of ˜480 ASOs targeting MLH1, as well as IC₂₀, IC₅₀ and IC₅₀ values of approximately 48 positive ASOs from the dual dose screen, are shown in Table 12 below.

TABLE 12

| | | | | | | | mean % mRNA | | SD % mRNA | | | | |
|---|---|---|---|---|---|---|---|---|---|---|---|---|---|
| SEQ ID | | | Off-target Score | | | | remaining | | remaining | | IC20 | IC50 | IC80 |
| NO | Position | Sequence | Human | Cyno | Mouse | Rat | 2 nM | 20 nM | 2 nM | 20 nM | (nM) | (nM) | (nM) |
| 7 | 7 | AACTCTGTGGGTTGCTGGGT | 2 | 2 | NC | NC | 104.35 | 71.14 | 13.91 | 14.16 | NA | NA | NA |
| 9 | 15 | AATTTCTCAACTCTGTGGGT | 2 | 1 | NC | NC | 99.83 | 100.39 | 6.85 | 7.93 | NA | NA | NA |
| 10 | 16 | AAATTTCTCAACTCTGTGGG | 2 | 2 | NC | NC | 100.93 | 100.50 | 10.87 | 7.83 | NA | NA | NA |
| 12 | 18 | TCAAATTTCTCAACTCTGTG | 2 | 2 | NC | NC | 97.45 | 85.69 | 8.92 | 20.36 | NA | NA | NA |
| 13 | 19 | GTCAAATTTCTCAACTCTGT | 2 | 2 | NC | NC | 101.96 | 80.20 | 7.23 | 26.13 | NA | NA | NA |
| 19 | 25 | ATGCCAGTCAAATTTCTCAA | 2 | 2 | NC | NC | 85.74 | 92.33 | 8.97 | 4.37 | NA | NA | NA |
| 20 | 26 | AATGCCAGTCAAATTTCTCA | 2 | 2 | NC | NC | 92.97 | 92.03 | 10.93 | 6.17 | NA | NA | NA |
| 21 | 27 | GAATGCCAGTCAAATTTCTC | 3 | 1 | NC | NC | 98.85 | 93.56 | 9.40 | 3.31 | NA | NA | NA |
| 22 | 28 | TGAATGCCAGTCAAATTTCT | 2 | 2 | NC | NC | 104.98 | 111.94 | 12.87 | 30.18 | NA | NA | NA |
| 23 | 29 | TTGAATGCCAGTCAAATTTC | 2 | 2 | NC | NC | 108.49 | 93.37 | 12.54 | 5.14 | NA | NA | NA |
| 24 | 30 | CTTGAATGCCAGTCAAATTT | 2 | 2 | NC | NC | 102.13 | 89.79 | 8.01 | 4.52 | NA | NA | NA |
| 25 | 31 | GCTTGAATGCCAGTCAAATT | 2 | 2 | NC | NC | 107.69 | 89.66 | 9.25 | 2.29 | NA | NA | NA |
| 26 | 32 | AGCTTGAATGCCAGTCAAAT | 2 | 2 | NC | NC | 115.30 | 85.50 | 5.37 | 3.08 | NA | NA | NA |
| 27 | 33 | CAGCTTGAATGCCAGTCAAA | 2 | 2 | NC | NC | 127.17 | 80.79 | 14.29 | 2.47 | NA | NA | NA |
| 54 | 105 | GTGCTCACGTTCTTCCTTCA | 2 | 2 | NC | NC | 110.43 | 84.17 | 10.06 | 28.87 | NA | NA | NA |
| 58 | 153 | GTCTAGATGCTCAACGGAAG | 3 | 1 | NC | NC | 77.65 | 70.07 | 4.17 | 6.43 | NA | NA | NA |
| 59 | 154 | CGTCTAGATGCTCAACGGAA | 2 | 1 | NC | NC | 77.01 | 69.92 | 3.64 | 1.43 | NA | NA | NA |
| 60 | 155 | ACGTCTAGATGCTCAACGGA | 2 | 2 | NC | NC | 74.53 | 79.00 | 8.98 | 6.49 | NA | NA | NA |
| 61 | 156 | AACGTCTAGATGCTCAACGG | 3 | 2 | NC | NC | 74.97 | 78.69 | 6.16 | 8.53 | NA | NA | NA |
| 62 | 158 | GAAACGTCTAGATGCTCAAC | 3 | 2 | NC | NC | 83.73 | 77.36 | 3.52 | 5.83 | NA | NA | NA |
| 63 | 159 | GGAAACGTCTAGATGCTCAA | 2 | 2 | NC | NC | 77.27 | 67.40 | 8.64 | 12.29 | NA | NA | NA |
| 81 | 196 | CCTGCCACGAACGACATTTT | 2 | 2 | NC | NC | 52.53 | 23.65 | 6.81 | 6.28 | NA | NA | NA |
| 82 | 197 | CCCTGCCACGAACGACATTT | 3 | 1 | NC | NC | 33.75 | 19.40 | 5.46 | 1.79 | NA | NA | NA |
| 83 | 202 | ATAACCCCTGCCACGAACGA | 3 | 2 | NC | NC | 63.35 | 24.88 | 6.81 | 3.22 | NA | NA | NA |
| 84 | 203 | AATAACCCCTGCCACGAACG | 2 | 2 | NC | NC | 53.65 | 29.25 | 14.61 | 4.28 | NA | NA | NA |
| 86 | 205 | CGAATAACCCCTGCCACGAA | 2 | 2 | NC | NC | 48.59 | 21.32 | 4.16 | 1.00 | NA | NA | NA |
| 87 | 229 | TTCACCACTGTCTCGTCCAG | 2 | 2 | NC | NC | 55.00 | 26.06 | 7.08 | 2.51 | NA | NA | NA |
| 90 | 236 | GATGCGGTTCACCACTGTCT | 3 | 2 | NC | NC | 45.96 | 34.50 | 1.21 | 3.76 | NA | NA | NA |
| 99 | 292 | TTCTCAATCATCTCTTTGAT | 2 | 1 | NC | NC | 60.15 | 23.70 | 3.42 | 6.43 | NA | NA | NA |
| 100 | 293 | GTTCTCAATCATCTCTTTGA | 2 | 2 | NC | NC | 35.82 | 25.52 | 1.30 | 3.37 | NA | NA | NA |
| 101 | 294 | AGTTCTCAATCATCTCTTTG | 2 | 2 | NC | NC | 34.56 | 20.99 | 2.80 | 8.30 | NA | NA | NA |
| 106 | 299 | TAAACAGTTCTCAATCATCT | 2 | 2 | NC | NC | 65.12 | 23.29 | 1.36 | 6.86 | NA | NA | NA |
| 107 | 300 | CTAAACAGTTCTCAATCATC | 2 | 2 | NC | NC | 81.44 | 37.09 | 5.98 | 4.60 | NA | NA | NA |
| 108 | 301 | TCTAAACAGTTCTCAATCAT | 2 | 1 | NC | NC | 94.04 | 41.93 | 3.64 | 7.23 | NA | NA | NA |
| 109 | 302 | ATCTAAACAGTTCTCAATCA | 2 | 2 | NC | NC | 83.80 | 43.08 | 3.87 | 6.44 | NA | NA | NA |
| 111 | 304 | GCATCTAAACAGTTCTCAAT | 2 | 2 | NC | NC | 59.23 | 38.77 | 3.24 | 6.32 | NA | NA | NA |
| 113 | 306 | TTGCATCTAAACAGTTCTCA | 2 | 3 | NC | NC | 47.29 | 27.54 | 3.93 | 4.15 | NA | NA | NA |
| 114 | 307 | TTTGCATCTAAACAGTTCTC | 2 | 2 | NC | NC | 60.27 | 27.21 | 7.74 | 4.51 | NA | NA | NA |
| 117 | 310 | GATTTTGCATCTAAACAGTT | 1 | 1 | 2 | 2 | 85.40 | 39.72 | 9.90 | 3.90 | NA | NA | NA |
| 122 | 315 | TTGTGGATTTTGCATCTAAA | 2 | 2 | NC | NC | 36.71 | 6.97 | 7.26 | 0.94 | NA | NA | NA |
| 123 | 316 | CTTGTGGATTTTGCATCTAA | 2 | 2 | NC | NC | 32.56 | 7.26 | 3.43 | 1.51 | NA | NA | NA |
| 124 | 317 | ACTTGTGGATTTTGCATCTA | 2 | 2 | NC | NC | 27.77 | 23.34 | 1.76 | 3.38 | NA | NA | NA |
| 125 | 318 | TACTTGTGGATTTTGCATCT | 2 | 2 | NC | NC | 28.15 | 9.60 | 2.12 | 1.27 | NA | NA | NA |
| 126 | 319 | ATACTTGTGGATTTTGCATC | 2 | 2 | NC | NC | 30.43 | 11.37 | 7.86 | 2.72 | NA | NA | NA |
| 129 | 322 | TGAATACTTGTGGATTTTGC | 2 | 2 | NC | NC | 28.88 | 7.61 | 2.36 | 0.45 | NA | NA | NA |
| 130 | 323 | TTGAATACTTGTGGATTTTG | 2 | 2 | NC | NC | 64.65 | 12.11 | 3.61 | 3.43 | NA | NA | NA |
| 131 | 324 | CTTGAATACTTGTGGATTTT | 2 | 2 | NC | NC | 43.96 | 10.11 | 3.33 | 3.46 | NA | NA | NA |
| 137 | 330 | CAATCACTTGAATACTTGTG | 2 | 2 | NC | NC | 31.45 | 7.57 | 2.96 | 0.20 | NA | NA | NA |
| 138 | 331 | ACAATCACTTGAATACTTGT | 2 | 2 | NC | NC | 61.59 | 17.94 | 3.03 | 1.20 | NA | NA | NA |
| 140 | 333 | TAACAATCACTTGAATACTT | 2 | 1 | NC | NC | 90.85 | 24.99 | 8.92 | 1.23 | NA | NA | NA |
| 142 | 335 | TTTAACAATCACTTGAATAC | 2 | 2 | NC | NC | 100.31 | 41.90 | 15.66 | 1.99 | NA | NA | NA |
| 143 | 336 | CTTTAACAATCACTTGAATA | 2 | 2 | NC | NC | 108.97 | 41.71 | 4.46 | 5.93 | NA | NA | NA |
| 144 | 337 | TCTTTAACAATCACTTGAAT | 2 | 2 | NC | NC | 73.97 | 15.40 | 7.19 | 4.30 | NA | NA | NA |
| 146 | 339 | CCTCTTTAACAATCACTTGA | 2 | 2 | NC | NC | 24.05 | 7.50 | 2.76 | 0.61 | NA | NA | NA |
| 147 | 341 | TCCCTCTTTAACAATCACTT | 2 | 2 | NC | NC | 33.48 | 14.58 | 3.59 | 2.42 | NA | NA | NA |
| 148 | 342 | CTCCCTCTTTAACAATCACT | 2 | 2 | NC | NC | 42.95 | 16.27 | 4.12 | 2.50 | NA | NA | NA |
| 149 | 343 | CCTCCCTCTTTAACAATCAC | 2 | 2 | NC | NC | 50.06 | 17.79 | 12.35 | 5.07 | NA | NA | NA |
| 150 | 344 | GCCTCCCTCTTTAACAATCA | 2 | 2 | NC | NC | 45.93 | 23.38 | 6.61 | 9.77 | NA | NA | NA |
| 151 | 345 | GGCCTCCCTCTTTAACAATC | 2 | 2 | NC | NC | 45.03 | 15.58 | 7.23 | 1.62 | NA | NA | NA |
| 152 | 346 | AGGCCTCCCTCTTTAACAAT | 2 | 2 | NC | NC | 34.11 | 32.22 | 4.01 | 3.43 | NA | NA | NA |
| 153 | 357 | GAATCAACTTCAGGCCTCCC | 2 | 2 | NC | NC | 41.96 | 11.54 | 6.08 | 1.44 | NA | NA | NA |
| 154 | 358 | TGAATCAACTTCAGGCCTCC | 2 | 3 | NC | NC | 50.20 | 6.62 | 7.94 | 1.20 | NA | NA | NA |
| 155 | 366 | CTTGGATCTGAATCAACTTC | 2 | 2 | NC | NC | 65.36 | 9.43 | 5.30 | 1.36 | NA | NA | NA |
| 156 | 367 | TCTTGGATCTGAATCAACTT | 2 | 2 | NC | NC | 80.83 | 11.67 | 6.59 | 0.83 | NA | NA | NA |
| 157 | 368 | GTCTTGGATCTGAATCAACT | 2 | 1 | NC | NC | 61.03 | 15.65 | 3.50 | 0.72 | NA | NA | NA |
| 158 | 369 | TGTCTTGGATCTGAATCAAC | 2 | 3 | NC | NC | 75.35 | 12.67 | 8.90 | 1.50 | NA | NA | NA |
| 159 | 370 | TTGTCTTGGATCTGAATCAA | 2 | 2 | NC | NC | 91.57 | 21.18 | 8.97 | 1.65 | NA | NA | NA |
| 160 | 371 | ATTGTCTTGGATCTGAATCA | 2 | 2 | NC | NC | 100.24 | 31.45 | 13.98 | 5.42 | NA | NA | NA |
| 172 | 397 | AGATCTTCTTTCCTGATCCC | 2 | 2 | NC | NC | 33.96 | 22.36 | 3.22 | 2.03 | NA | NA | NA |
| 188 | 413 | TTCACATACAATATCCAGAT | 2 | 1 | NC | NC | 38.68 | 6.11 | 3.67 | 0.64 | NA | NA | NA |
| 189 | 414 | TTTCACATACAATATCCAGA | 2 | 2 | NC | NC | 53.02 | 9.11 | 3.58 | 1.85 | NA | NA | NA |
| 190 | 415 | CTTTCACATACAATATCCAG | 2 | 1 | NC | NC | 70.51 | 13.27 | 2.71 | 1.69 | NA | NA | NA |
| 191 | 416 | CCTTTCACATACAATATCCA | 2 | 2 | NC | NC | 56.82 | 12.07 | 1.68 | 1.04 | NA | NA | NA |
| 211 | 448 | TCCTCAAAGGACTGCAGTTT | 2 | 2 | NC | NC | 21.91 | 11.33 | 1.20 | 0.58 | NA | NA | NA |
| 215 | 461 | AATACTGGCTAAATCCTCAA | 2 | 2 | 2 | NC | 62.56 | 22.15 | 4.11 | 0.99 | NA | NA | NA |
| 216 | 462 | AAATACTGGCTAAATCCTCA | 2 | 1 | 2 | NC | 65.69 | 13.57 | 5.67 | 0.91 | NA | NA | NA |
| 217 | 463 | GAAATACTGGCTAAATCCTC | 3 | 2 | 2 | NC | 76.74 | 24.80 | 12.28 | 5.94 | NA | NA | NA |
| 218 | 464 | AGAAATACTGGCTAAATCCT | 2 | 2 | 2 | NC | 98.15 | 30.43 | 12.12 | 2.04 | NA | NA | NA |
| 219 | 465 | TAGAAATACTGGCTAAATCC | 2 | 2 | 2 | NC | 101.50 | 23.30 | 10.53 | 2.98 | NA | NA | NA |
| 220 | 466 | GTAGAAATACTGGCTAAATC | 2 | 2 | 2 | NC | 88.38 | 31.18 | 16.60 | 1.58 | NA | NA | NA |
| 221 | 467 | GGTAGAAATACTGGCTAAAT | 2 | 2 | 2 | NC | 70.46 | 50.62 | 7.85 | 2.86 | NA | NA | NA |
| 222 | 468 | AGGTAGAAATACTGGCTAAA | 1 | 2 | 1 | NC | 74.73 | 34.51 | 4.64 | 7.11 | NA | NA | NA |
| 223 | 469 | TAGGTAGAAATACTGGCTAA | 1 | 2 | 2 | NC | 56.63 | 13.53 | 23.00 | 3.09 | NA | NA | NA |
| 224 | 470 | ATAGGTAGAAATACTGGCTA | 2 | 3 | 2 | NC | 53.77 | 17.28 | 5.53 | 0.86 | NA | NA | NA |
| 225 | 471 | CATAGGTAGAAATACTGGCT | 2 | 2 | 2 | NC | 29.85 | 16.04 | 8.85 | 1.61 | NA | NA | NA |
| 226 | 472 | CCATAGGTAGAAATACTGGC | 2 | 3 | 2 | NC | 44.14 | 11.24 | 7.00 | 3.21 | NA | NA | NA |
| 229 | 475 | AAGCCATAGGTAGAAATACT | 2 | 2 | 2 | NC | 88.23 | 21.03 | 4.95 | 1.76 | NA | NA | NA |
| 230 | 476 | AAAGCCATAGGTAGAAATAC | 2 | 3 | 2 | NC | 126.10 | 46.70 | 10.66 | 4.68 | NA | NA | NA |
| 231 | 477 | GAAAGCCATAGGTAGAAATA | 2 | 1 | 1 | NC | 106.65 | 39.76 | 7.30 | 0.42 | NA | NA | NA |
| 232 | 478 | CGAAAGCCATAGGTAGAAAT | 2 | 2 | 1 | NC | 84.03 | 25.60 | 22.61 | 2.02 | NA | NA | NA |
| 233 | 479 | TCGAAAGCCATAGGTAGAAA | 2 | 2 | NC | NC | 75.55 | 27.07 | 3.57 | 1.55 | NA | NA | NA |
| 234 | 480 | CTCGAAAGCCATAGGTAGAA | 2 | 2 | NC | NC | 88.46 | 16.94 | 6.53 | 1.96 | NA | NA | NA |
| 235 | 481 | CCTCGAAAGCCATAGGTAGA | 2 | 2 | NC | NC | 47.28 | 14.08 | 11.65 | 0.84 | NA | NA | NA |
| 236 | 485 | CTCACCTCGAAAGCCATAGG | 2 | 2 | NC | NC | 27.57 | 21.90 | 8.01 | 5.26 | NA | NA | NA |
| 237 | 486 | CCTCACCTCGAAAGCCATAG | 2 | 2 | NC | NC | 25.13 | 10.37 | 4.41 | 3.07 | NA | NA | NA |
| 238 | 487 | GCCTCACCTCGAAAGCCATA | 2 | 1 | NC | NC | 21.60 | 17.21 | 1.89 | 2.24 | NA | NA | NA |
| 239 | 488 | AGCCTCACCTCGAAAGCCAT | 2 | 2 | NC | NC | 39.33 | 16.62 | 3.53 | 1.29 | NA | NA | NA |
| 242 | 491 | CAAAGCCTCACCTCGAAAGC | 2 | 1 | NC | NC | 68.06 | 20.54 | 14.63 | 5.51 | NA | NA | NA |
| 243 | 492 | CCAAAGCCTCACCTCGAAAG | 2 | 2 | NC | NC | 65.39 | 19.97 | 8.02 | 3.06 | NA | NA | NA |
| 244 | 493 | GCCAAAGCCTCACCTCGAAA | 2 | 2 | NC | NC | 31.19 | 21.00 | 1.08 | 1.73 | NA | NA | NA |
| 245 | 525 | TAATAGTAACATGAGCCACA | 2 | 2 | NC | NC | 53.67 | 10.20 | 13.67 | 2.33 | NA | NA | NA |
| 246 | 526 | GTAATAGTAACATGAGCCAC | 2 | 1 | NC | NC | 36.92 | 49.08 | 2.19 | 7.25 | NA | NA | NA |
| 247 | 527 | TGTAATAGTAACATGAGCCA | 2 | 3 | NC | NC | 32.79 | 30.80 | 8.50 | 4.22 | NA | NA | NA |
| 248 | 528 | TTGTAATAGTAACATGAGCC | 2 | 2 | NC | NC | 36.71 | 14.75 | 4.93 | 1.85 | NA | NA | NA |
| 249 | 529 | GTTGTAATAGTAACATGAGC | 2 | 2 | NC | NC | 25.96 | 54.83 | 2.94 | 2.76 | NA | NA | NA |
| 270 | 550 | CACTTTCCATCAGCTGTTTT | 2 | 2 | NC | NC | 85.01 | 14.38 | 11.59 | 3.78 | NA | NA | NA |
| 271 | 551 | ACACTTTCCATCAGCTGTTT | 2 | 2 | NC | NC | 52.03 | 14.17 | 1.59 | 3.52 | NA | NA | NA |
| 274 | 554 | TGCACACTTTCCATCAGCTG | 2 | 2 | NC | NC | 17.31 | 20.13 | 2.02 | 6.11 | NA | NA | NA |
| 275 | 555 | ATGCACACTTTCCATCAGCT | 2 | 2 | NC | NC | 21.62 | 17.12 | 3.23 | 3.11 | NA | NA | NA |
| 276 | 556 | TATGCACACTTTCCATCAGC | 2 | 1 | NC | NC | 40.73 | 13.28 | 2.90 | 1.04 | NA | NA | NA |
| 277 | 557 | GTATGCACACTTTCCATCAG | 2 | 2 | NC | NC | 25.94 | 38.62 | 2.55 | 4.69 | NA | NA | NA |
| 278 | 558 | TGTATGCACACTTTCCATCA | 2 | 1 | NC | NC | 39.11 | 10.83 | 0.78 | 0.92 | NA | NA | NA |
| 279 | 559 | CTGTATGCACACTTTCCATC | 2 | 2 | NC | NC | 28.69 | 6.52 | 3.10 | 0.98 | NA | NA | NA |
| 286 | 573 | CTGAGTAACTTGCTCTGTAT | 2 | 2 | NC | NC | 18.63 | 7.51 | 2.27 | 2.11 | NA | NA | NA |
| 287 | 574 | TCTGAGTAACTTGCTCTGTA | 1 | 2 | 2 | 2 | 20.22 | 20.80 | 2.72 | 2.62 | NA | NA | NA |
| 288 | 575 | ATCTGAGTAACTTGCTCTGT | 2 | 2 | 2 | 2 | 21.77 | 22.63 | 1.03 | 2.46 | NA | NA | NA |
| 289 | 576 | CATCTGAGTAACTTGCTCTG | 2 | 2 | 2 | 2 | 22.93 | 10.42 | 2.98 | 1.07 | NA | NA | NA |
| 290 | 577 | CCATCTGAGTAACTTGCTCT | 2 | 2 | 2 | 2 | 23.21 | 8.99 | 6.91 | 2.27 | NA | NA | NA |
| 291 | 578 | TCCATCTGAGTAACTTGCTC | 2 | 2 | 2 | 3 | 12.91 | 8.39 | 0.94 | 1.68 | 0.25 | 0.82 | 3.18 |
| 292 | 579 | TTCCATCTGAGTAACTTGCT | 2 | 2 | 2 | 3 | 14.52 | 6.71 | 1.20 | 1.41 | 0.42 | 1.05 | 2.86 |
| 293 | 580 | TTTCCATCTGAGTAACTTGC | 2 | 2 | 2 | 3 | 15.77 | 6.93 | 3.52 | 0.62 | 0.45 | 0.93 | 2.33 |
| 295 | 582 | GTTTTCCATCTGAGTAACTT | 2 | 2 | NC | NC | 27.05 | 21.26 | 4.08 | 1.98 | NA | NA | NA |
| 296 | 583 | AGTTTTCCATCTGAGTAACT | 2 | 2 | NC | NC | 27.26 | 22.83 | 3.20 | 1.24 | NA | NA | NA |
| 297 | 584 | CAGTTTTCCATCTGAGTAAC | 2 | 2 | NC | NC | 43.93 | 9.42 | 6.80 | 1.05 | NA | NA | NA |
| 298 | 585 | TCAGTTTTCCATCTGAGTAA | 2 | 2 | NC | NC | 25.68 | 6.86 | 4.41 | 1.32 | NA | NA | NA |
| 310 | 632 | CGTGATCTGGGTCCCTTGAT | 2 | 2 | NC | NC | 22.66 | 9.44 | 2.16 | 2.57 | NA | NA | NA |
| 311 | 663 | TCGTGGCTATGTTGTAAAAA | 3 | 2 | NC | NC | 30.05 | 21.14 | 2.90 | 1.76 | NA | NA | NA |
| 312 | 664 | CTCGTGGCTATGTTGTAAAA | 2 | 1 | NC | NC | 31.88 | 10.71 | 2.33 | 1.39 | NA | NA | NA |
| 313 | 665 | CCTCGTGGCTATGTTGTAAA | 2 | 2 | NC | NC | 14.82 | 8.41 | 1.74 | 0.89 | 2.08 | 5.22 | 14.59 |
| 314 | 666 | TCCTCGTGGCTATGTTGTAA | 2 | 2 | NC | NC | 17.40 | 9.66 | 1.82 | 1.58 | NA | NA | NA |
| 315 | 667 | CTCCTCGTGGCTATGTTGTA | 3 | 2 | NC | NC | 17.11 | 10.01 | 3.02 | 0.91 | NA | NA | NA |
| 316 | 668 | TCTCCTCGTGGCTATGTTGT | 2 | 3 | NC | NC | 16.78 | 8.86 | 1.33 | 0.75 | 0.36 | 0.95 | 3.34 |
| 317 | 669 | TTCTCCTCGTGGCTATGTTG | 2 | 2 | NC | NC | 13.93 | 7.60 | 1.53 | 0.72 | 0.33 | 0.94 | 3.17 |
| 318 | 670 | TTTCTCCTCGTGGCTATGTT | 2 | 2 | NC | NC | 36.74 | 9.22 | 11.20 | 1.63 | NA | NA | NA |
| 319 | 671 | TTTTCTCCTCGTGGCTATGT | 2 | 2 | NC | NC | 30.22 | 7.09 | 6.50 | 0.94 | NA | NA | NA |
| 320 | 672 | CTTTTCTCCTCGTGGCTATG | 2 | 2 | NC | NC | 30.01 | 8.21 | 6.17 | 1.37 | NA | NA | NA |
| 322 | 674 | AGCTTTTCTCCTCGTGGCTA | 2 | 2 | NC | NC | 15.61 | 24.15 | 1.15 | 5.01 | NA | NA | NA |
| 323 | 675 | AAGCTTTTCTCCTCGTGGCT | 2 | 2 | NC | NC | 13.29 | 21.60 | 0.58 | 3.30 | NA | NA | NA |
| 324 | 676 | AAAGCTTTTCTCCTCGTGGC | 2 | 1 | NC | NC | 7.91 | 22.01 | 0.66 | 5.22 | NA | NA | NA |
| 325 | 677 | TAAAGCTTTTCTCCTCGTGG | 2 | 2 | NC | NC | 7.62 | 5.41 | 0.57 | 0.70 | 0.13 | 0.38 | 1.25 |
| 326 | 678 | TTAAAGCTTTTCTCCTCGTG | 3 | 2 | NC | NC | 16.56 | 4.90 | 1.53 | 0.44 | 0.26 | 0.93 | 3.32 |
| 327 | 679 | TTTAAAGCTTTTCTCCTCGT | 2 | 2 | NC | NC | 29.15 | 4.68 | 0.91 | 0.45 | NA | NA | NA |
| 328 | 680 | TTTTAAAGCTTTTCTCCTCG | 2 | 2 | NC | NC | 43.20 | 7.15 | 4.04 | 1.27 | NA | NA | NA |
| 332 | 699 | CATATTCTTCACTTGGATTT | 2 | 2 | NC | NC | 57.71 | 12.58 | 9.76 | 1.59 | NA | NA | NA |
| 333 | 700 | CCATATTCTTCACTTGGATT | 2 | 2 | NC | NC | 22.46 | 15.07 | 1.49 | 13.75 | NA | NA | NA |
| 334 | 701 | CCCATATTCTTCACTTGGAT | 2 | 2 | NC | NC | 12.58 | 8.36 | 1.90 | 1.14 | 0.08 | 0.40 | 2.04 |
| 335 | 702 | TCCCATATTCTTCACTTGGA | 2 | 3 | NC | NC | 11.94 | 7.01 | 1.30 | 0.65 | 0.08 | 0.50 | 2.76 |
| 336 | 703 | TTCCCATATTCTTCACTTGG | 2 | 2 | NC | NC | 105.05 | 106.90 | 4.22 | 6.04 | NA | NA | NA |
| 337 | 704 | TTTCCCATATTCTTCACTTG | 2 | 2 | NC | NC | 69.00 | 13.33 | 7.64 | 4.40 | NA | NA | NA |
| 342 | 709 | AAAATTTTCCCATATTCTTC | 2 | 2 | NC | NC | 90.57 | 56.39 | 5.40 | 8.44 | NA | NA | NA |
| 345 | 712 | TCCAAAATTTTCCCATATTC | 2 | 2 | NC | NC | 73.51 | 23.08 | 9.29 | 5.26 | NA | NA | NA |
| 383 | 760 | ACTGAGAAACTAATGCCTGC | 2 | 2 | NC | NC | 30.19 | 36.06 | 13.92 | 6.43 | NA | NA | NA |
| 384 | 761 | AACTGAGAAACTAATGCCTG | 2 | 2 | 2 | NC | 32.91 | 18.09 | 4.29 | 0.65 | NA | NA | NA |
| 385 | 762 | TAACTGAGAAACTAATGCCT | 2 | 2 | 2 | NC | 54.54 | 7.98 | 4.80 | 1.50 | NA | NA | NA |
| 386 | 763 | TTAACTGAGAAACTAATGCC | 1 | NC | 2 | NC | 69.97 | 7.71 | 4.83 | 0.91 | NA | NA | NA |
| 387 | 764 | TTTAACTGAGAAACTAATGC | 1 | 1 | 2 | NC | 91.14 | 15.15 | 4.95 | 1.92 | NA | NA | NA |
| 388 | 765 | TTTTAACTGAGAAACTAATG | 1 | 2 | 2 | NC | 102.79 | 24.74 | 6.79 | 3.85 | NA | NA | NA |
| 397 | 790 | ACATCAGCTACTGTCTCTCC | 2 | 3 | NC | NC | 58.09 | 9.95 | 6.24 | 1.25 | NA | NA | NA |
| 398 | 791 | AACATCAGCTACTGTCTCTC | 2 | 2 | NC | NC | 64.72 | 12.13 | 3.53 | 2.74 | NA | NA | NA |
| 399 | 792 | TAACATCAGCTACTGTCTCT | 2 | 2 | NC | NC | 61.25 | 10.52 | 5.57 | 1.14 | NA | NA | NA |
| 400 | 793 | CTAACATCAGCTACTGTCTC | 2 | 2 | NC | NC | 58.00 | 9.48 | 5.24 | 1.33 | NA | NA | NA |
| 401 | 794 | CCTAACATCAGCTACTGTCT | 2 | 2 | NC | NC | 31.28 | 7.21 | 6.03 | 1.48 | NA | NA | NA |
| 402 | 795 | TCCTAACATCAGCTACTGTC | 2 | 2 | NC | NC | 27.71 | 6.73 | 2.81 | 0.51 | NA | NA | NA |
| 405 | 798 | GTGTCCTAACATCAGCTACT | 2 | 2 | NC | NC | 22.45 | 17.51 | 2.26 | 1.39 | NA | NA | NA |
| 406 | 799 | AGTGTCCTAACATCAGCTAC | 2 | 2 | NC | NC | 28.59 | 28.60 | 1.72 | 4.24 | NA | NA | NA |
| 407 | 800 | TAGTGTCCTAACATCAGCTA | 3 | 3 | NC | NC | 33.38 | 8.27 | 5.20 | 0.29 | NA | NA | NA |
| 408 | 801 | GTAGTGTCCTAACATCAGCT | 3 | 1 | NC | NC | 15.92 | 26.00 | 3.79 | 1.63 | NA | NA | NA |
| 409 | 802 | GGTAGTGTCCTAACATCAGC | 2 | 2 | NC | NC | 16.90 | 31.80 | 1.99 | 4.13 | NA | NA | NA |
| 410 | 803 | GGGTAGTGTCCTAACATCAG | 2 | 2 | NC | NC | 14.65 | 29.55 | 1.45 | 2.27 | NA | NA | NA |
| 411 | 804 | TGGGTAGTGTCCTAACATCA | 2 | 2 | NC | NC | 14.54 | 11.44 | 5.46 | 2.55 | NA | NA | NA |
| 412 | 805 | TTGGGTAGTGTCCTAACATC | 2 | 1 | NC | NC | 27.50 | 6.35 | 0.34 | 1.21 | NA | NA | NA |
| 413 | 806 | ATTGGGTAGTGTCCTAACAT | 2 | 1 | NC | NC | 29.79 | 23.52 | 7.21 | 3.09 | NA | NA | NA |
| 415 | 808 | GCATTGGGTAGTGTCCTAAC | 3 | 1 | NC | NC | 11.84 | 11.36 | 2.10 | 2.39 | 0.14 | 0.36 | 1.21 |
| 416 | 809 | GGCATTGGGTAGTGTCCTAA | 2 | 2 | NC | NC | 9.48 | 17.09 | 0.76 | 1.03 | NA | NA | NA |
| 417 | 810 | AGGCATTGGGTAGTGTCCTA | 2 | 3 | NC | NC | 12.81 | 15.60 | 0.64 | 1.47 | NA | NA | NA |
| 418 | 811 | GAGGCATTGGGTAGTGTCCT | 2 | 3 | NC | NC | 17.87 | 26.51 | 0.54 | 3.00 | NA | NA | NA |
| 419 | 812 | TGAGGCATTGGGTAGTGTCC | 2 | 3 | NC | NC | 21.17 | 11.63 | 3.02 | 0.77 | NA | NA | NA |
| 420 | 813 | TTGAGGCATTGGGTAGTGTC | 2 | 2 | NC | NC | 26.62 | 12.47 | 2.28 | 1.53 | NA | NA | NA |
| 421 | 814 | GTTGAGGCATTGGGTAGTGT | 2 | 2 | NC | NC | 29.79 | 17.15 | 3.24 | 1.50 | NA | NA | NA |
| 458 | 868 | TCTATCAGTTCTCGACTAAC | 2 | 3 | 1 | NC | 71.94 | 17.44 | 7.71 | 2.19 | NA | NA | NA |
| 473 | 884 | ATCCTCACATCCAATTTCTA | 2 | 2 | NC | NC | 67.22 | 23.05 | 2.68 | 6.53 | NA | NA | NA |
| 474 | 885 | TATCCTCACATCCAATTTCT | 2 | 2 | NC | NC | 67.80 | 17.81 | 4.08 | 3.67 | NA | NA | NA |
| 476 | 887 | TTTATCCTCACATCCAATTT | 2 | 1 | NC | NC | 84.61 | 14.33 | 14.95 | 4.23 | NA | NA | NA |
| 477 | 888 | TTTTATCCTCACATCCAATT | 2 | 2 | NC | NC | 75.61 | 16.36 | 8.29 | 3.35 | NA | NA | NA |
| 478 | 889 | GTTTTATCCTCACATCCAAT | 2 | 2 | NC | NC | 46.47 | 12.22 | 1.58 | 1.02 | NA | NA | NA |
| 482 | 893 | TAGGGTTTTATCCTCACATC | 2 | 2 | NC | NC | 20.38 | 6.34 | 1.89 | 1.11 | NA | NA | NA |
| 483 | 894 | CTAGGGTTTTATCCTCACAT | 2 | 2 | NC | NC | 11.09 | 6.25 | 5.03 | 1.17 | 0.09 | 0.30 | 1.09 |
| 484 | 895 | GCTAGGGTTTTATCCTCACA | 3 | 2 | 2 | 2 | 8.67 | 19.52 | 2.89 | 4.04 | NA | NA | NA |
| 485 | 896 | GGCTAGGGTTTTATCCTCAC | 2 | 2 | NC | NC | 6.96 | 15.56 | 4.28 | 1.74 | 0.04 | 0.14 | 0.64 |
| 486 | 897 | AGGCTAGGGTTTTATCCTCA | 2 | 2 | NC | NC | 11.93 | 8.49 | 9.21 | 1.22 | 0.05 | 0.21 | 1.09 |
| 487 | 898 | AAGGCTAGGGTTTTATCCTC | 2 | 3 | NC | NC | 25.71 | 13.09 | 4.84 | 1.26 | NA | NA | NA |
| 490 | 902 | TTTGAAGGCTAGGGTTTTAT | 2 | 1 | NC | NC | 36.90 | 9.31 | 15.37 | 1.09 | NA | NA | NA |
| 491 | 903 | TTTTGAAGGCTAGGGTTTTA | 2 | 3 | NC | NC | 40.51 | 8.68 | 17.94 | 3.19 | NA | NA | NA |
| 493 | 905 | CATTTTGAAGGCTAGGGTTT | 2 | 2 | NC | NC | 31.27 | 10.30 | 10.35 | 1.51 | NA | NA | NA |
| 494 | 906 | TCATTTTGAAGGCTAGGGTT | 2 | 2 | NC | NC | 19.42 | 9.09 | 1.85 | 0.67 | NA | NA | NA |
| 497 | 909 | CATTCATTTTGAAGGCTAGG | 2 | 3 | NC | NC | 22.09 | 6.82 | 5.83 | 0.49 | NA | NA | NA |
| 498 | 910 | CCATTCATTTTGAAGGCTAG | 2 | 2 | NC | NC | 21.00 | 7.91 | 10.54 | 1.08 | NA | NA | NA |
| 499 | 911 | ACCATTCATTTTGAAGGCTA | 2 | 2 | NC | NC | 11.75 | 8.10 | 0.75 | 1.05 | 0.12 | 0.43 | 1.95 |
| 500 | 912 | AACCATTCATTTTGAAGGCT | 2 | 2 | NC | NC | 14.55 | 8.40 | 4.11 | 1.33 | 0.12 | 0.44 | 1.09 |
| 501 | 913 | TAACCATTCATTTTGAAGGC | 2 | 1 | NC | NC | 21.12 | 6.92 | 1.54 | 0.78 | NA | NA | NA |
| 522 | 935 | TGAGTAGTTTGCATTGGATA | 3 | 2 | NC | NC | 25.31 | 8.60 | 2.41 | 0.53 | NA | NA | NA |
| 523 | 936 | CTGAGTAGTTTGCATTGGAT | 2 | 2 | NC | NC | 14.73 | 5.87 | 7.85 | 0.48 | 0.18 | 0.57 | 2.30 |
| 524 | 937 | ACTGAGTAGTTTGCATTGGA | 3 | 2 | NC | NC | 17.32 | 22.63 | 10.91 | 6.63 | NA | NA | NA |
| 525 | 938 | CACTGAGTAGTTTGCATTGG | 3 | 2 | NC | NC | 18.09 | 6.98 | 9.60 | 0.74 | 0.21 | 0.59 | 1.92 |
| 526 | 939 | TCACTGAGTAGTTTGCATTG | 2 | 2 | NC | NC | 23.66 | 6.34 | 5.99 | 0.88 | NA | NA | NA |
| 528 | 941 | CTTCACTGAGTAGTTTGCAT | 2 | 2 | NC | NC | 20.60 | 5.79 | 5.55 | 0.97 | NA | NA | NA |
| 529 | 942 | TCTTCACTGAGTAGTTTGCA | 2 | 2 | NC | NC | 35.84 | 5.65 | 6.31 | 0.14 | NA | NA | NA |
| 530 | 943 | TTCTTCACTGAGTAGTTTGC | 2 | 2 | NC | NC | 23.87 | 6.06 | 8.09 | 0.54 | NA | NA | NA |
| 542 | 965 | GATGAAGAGTAAGAAGATGC | 2 | 2 | NC | NC | 59.03 | 27.28 | 7.69 | 0.66 | NA | NA | NA |
| 545 | 968 | GTTGATGAAGAGTAAGAAGA | 2 | 2 | NC | NC | 57.72 | 23.10 | 6.90 | 6.32 | NA | NA | NA |
| 546 | 969 | GGTTGATGAAGAGTAAGAAG | 2 | 2 | NC | NC | 28.64 | 14.90 | 3.72 | 2.23 | NA | NA | NA |
| 547 | 970 | TGGTTGATGAAGAGTAAGAA | 2 | 2 | NC | NC | 43.23 | 11.01 | 4.88 | 0.60 | NA | NA | NA |
| 548 | 971 | ATGGTTGATGAAGAGTAAGA | 2 | 2 | NC | NC | 46.69 | 10.82 | 3.46 | 3.97 | NA | NA | NA |
| 549 | 972 | GATGGTTGATGAAGAGTAAG | 2 | 3 | NC | NC | 47.75 | 24.18 | 3.27 | 1.12 | NA | NA | NA |
| 551 | 974 | ACGATGGTTGATGAAGAGTA | 2 | 2 | NC | NC | 42.40 | 24.00 | 4.91 | 0.51 | NA | NA | NA |
| 552 | 975 | GACGATGGTTGATGAAGAGT | 3 | 1 | NC | NC | 51.66 | 19.10 | 4.23 | 3.08 | NA | NA | NA |
| 553 | 976 | AGACGATGGTTGATGAAGAG | 2 | 1 | NC | NC | 54.48 | 23.21 | 3.59 | 3.18 | NA | NA | NA |
| 554 | 977 | CAGACGATGGTTGATGAAGA | 2 | 2 | NC | NC | 50.61 | 16.47 | 1.40 | 0.72 | NA | NA | NA |
| 555 | 988 | GTTGATTCTACCAGACGATG | 3 | 2 | NC | NC | 26.32 | 16.83 | 2.41 | 0.90 | NA | NA | NA |
| 556 | 989 | AGTTGATTCTACCAGACGAT | 3 | 3 | NC | NC | 33.47 | 20.92 | 3.68 | 3.43 | NA | NA | NA |
| 557 | 990 | AAGTTGATTCTACCAGACGA | 3 | 2 | NC | NC | 37.29 | 13.99 | 5.68 | 1.26 | NA | NA | NA |
| 558 | 991 | GAAGTTGATTCTACCAGACG | 3 | 2 | NC | NC | 36.83 | 15.81 | 3.45 | 1.18 | NA | NA | NA |
| 559 | 992 | GGAAGTTGATTCTACCAGAC | 2 | 3 | NC | NC | 25.57 | 25.66 | 2.82 | 2.36 | NA | NA | NA |
| 560 | 993 | AGGAAGTTGATTCTACCAGA | 2 | 2 | NC | NC | 28.87 | 35.49 | 2.10 | 3.49 | NA | NA | NA |
| 563 | 1004 | GGCTTTTCTCAAGGAAGTTG | 2 | 1 | NC | NC | 8.42 | 23.13 | 1.20 | 3.51 | NA | NA | NA |
| 564 | 1005 | TGGCTTTTCTCAAGGAAGTT | 2 | 1 | NC | NC | 14.63 | 6.07 | 0.56 | 0.65 | 0.16 | 0.50 | 1.77 |
| 565 | 1006 | ATGGCTTTTCTCAAGGAAGT | 2 | 2 | NC | NC | 18.29 | 12.40 | 2.18 | 0.59 | NA | NA | NA |
| 585 | 1026 | AGGCTGCATACACTGTTTCT | 2 | 2 | NC | NC | 16.83 | 19.17 | 0.67 | 1.67 | NA | NA | NA |
| 586 | 1027 | TAGGCTGCATACACTGTTTC | 2 | 2 | NC | NC | 24.27 | 6.40 | 2.68 | 0.47 | NA | NA | NA |
| 596 | 1048 | GGGTGTGTGTTTTTGGGCAA | 2 | 2 | 2 | NC | 30.61 | 15.73 | 3.25 | 1.08 | NA | NA | NA |
| 597 | 1049 | TGGGTGTGTGTTTTTGGGCA | 2 | 3 | 2 | NC | 30.19 | 17.13 | 5.05 | 3.45 | NA | NA | NA |
| 598 | 1050 | ATGGGTGTGTGTTTTTGGGC | 2 | 2 | 2 | NC | 36.90 | 16.65 | 4.61 | 0.98 | NA | NA | NA |
| 599 | 1051 | AATGGGTGTGTGTTTTTGGG | 1 | 2 | 2 | NC | 75.12 | 40.31 | 8.71 | 4.14 | NA | NA | NA |
| 600 | 1052 | GAATGGGTGTGTGTTTTTGG | 1 | 2 | 2 | NC | 51.82 | 21.13 | 2.75 | 1.33 | NA | NA | NA |
| 601 | 1053 | GGAATGGGTGTGTGTTTTTG | 1 | 2 | 2 | NC | 71.06 | 21.58 | 4.82 | 1.14 | NA | NA | NA |
| 602 | 1054 | AGGAATGGGTGTGTGTTTTT | 2 | 2 | 2 | NC | 80.06 | 23.02 | 12.04 | 1.64 | NA | NA | NA |
| 603 | 1055 | CAGGAATGGGTGTGTGTTTT | 2 | 2 | 2 | NC | 53.62 | 10.12 | 5.42 | 2.81 | NA | NA | NA |
| 604 | 1056 | ACAGGAATGGGTGTGTGTTT | 2 | 2 | 1 | NC | 37.48 | 17.43 | 5.74 | 1.40 | NA | NA | NA |
| 605 | 1057 | TACAGGAATGGGTGTGTGTT | 2 | 2 | 1 | NC | 42.23 | 11.94 | 5.61 | 0.34 | NA | NA | NA |
| 606 | 1058 | GTACAGGAATGGGTGTGTGT | 1 | 2 | 1 | NC | 28.51 | 10.08 | 3.84 | 1.77 | NA | NA | NA |
| 607 | 1059 | GGTACAGGAATGGGTGTGTG | 2 | 2 | 1 | NC | 15.96 | 10.82 | 3.37 | 0.71 | 0.12 | 0.43 | 2.70 |
| 608 | 1060 | AGGTACAGGAATGGGTGTGT | 2 | 2 | 2 | NC | 14.46 | 14.35 | 2.43 | 1.39 | NA | NA | NA |
| 609 | 1061 | GAGGTACAGGAATGGGTGTG | 1 | 1 | 1 | NC | 20.90 | 11.65 | 1.55 | 1.31 | NA | NA | NA |
| 610 | 1062 | TGAGGTACAGGAATGGGTGT | 2 | 1 | 2 | NC | 30.84 | 14.99 | 3.61 | 1.31 | NA | NA | NA |
| 613 | 1075 | CTGATTTCTAAACTGAGGTA | 2 | 2 | NC | NC | 27.75 | 14.81 | 2.61 | 2.70 | NA | NA | NA |
| 619 | 1100 | CACATTAACATCCACATTCT | 2 | 2 | NC | NC | 68.79 | 13.92 | 7.77 | 0.84 | NA | NA | NA |
| 620 | 1101 | GCACATTAACATCCACATTC | 2 | 2 | NC | NC | 26.29 | 5.22 | 3.88 | 0.61 | NA | NA | NA |
| 621 | 1102 | TGCACATTAACATCCACATT | 2 | 2 | NC | NC | 38.95 | 9.02 | 5.64 | 0.72 | NA | NA | NA |
| 622 | 1103 | GTGCACATTAACATCCACAT | 2 | 2 | NC | NC | 20.30 | 3.66 | 3.65 | 0.50 | 0.11 | 0.57 | 3.11 |
| 631 | 1180 | AGCTTGCTCTCGATGTGCTG | 2 | 2 | NC | NC | 20.00 | 11.70 | 0.92 | 1.03 | NA | NA | NA |
| 632 | 1181 | GAGCTTGCTCTCGATGTGCT | 2 | 1 | NC | NC | 18.61 | 13.08 | 1.41 | 0.35 | NA | NA | NA |
| 633 | 1183 | AGGAGCTTGCTCTCGATGTG | 2 | 2 | NC | NC | 32.71 | 27.99 | 2.64 | 2.85 | NA | NA | NA |
| 634 | 1184 | CAGGAGCTTGCTCTCGATGT | 2 | 2 | NC | NC | 26.82 | 7.09 | 5.46 | 0.23 | NA | NA | NA |
| 636 | 1221 | AAGTCTGGGTGAAGTACATC | 2 | 2 | NC | NC | 46.64 | 16.14 | 3.71 | 0.79 | NA | NA | NA |
| 637 | 1222 | AAAGTCTGGGTGAAGTACAT | 2 | 2 | NC | NC | 52.38 | 18.35 | 4.92 | 1.70 | NA | NA | NA |
| 639 | 1224 | GCAAAGTCTGGGTGAAGTAC | 2 | 2 | NC | NC | 44.44 | 14.69 | 4.54 | 0.85 | NA | NA | NA |
| 640 | 1225 | AGCAAAGTCTGGGTGAAGTA | 2 | 2 | NC | NC | 30.68 | 13.69 | 6.16 | 1.26 | NA | NA | NA |
| 641 | 1226 | TAGCAAAGTCTGGGTGAAGT | 2 | 2 | NC | NC | 62.09 | 14.36 | 4.74 | 3.48 | NA | NA | NA |
| 642 | 1227 | GTAGCAAAGTCTGGGTGAAG | 2 | 2 | NC | NC | 42.69 | 15.79 | 7.89 | 0.84 | NA | NA | NA |
| 643 | 1228 | GGTAGCAAAGTCTGGGTGAA | 3 | 1 | NC | NC | 48.33 | 17.35 | 2.47 | 2.58 | NA | NA | NA |
| 644 | 1229 | TGGTAGCAAAGTCTGGGTGA | 2 | 2 | NC | NC | 87.84 | 51.60 | 14.42 | 2.89 | NA | NA | NA |
| 645 | 1230 | CTGGTAGCAAAGTCTGGGTG | 2 | 2 | NC | NC | 64.82 | 14.18 | 2.07 | 1.58 | NA | NA | NA |
| 646 | 1231 | CCTGGTAGCAAAGTCTGGGT | 2 | 2 | NC | NC | 50.97 | 9.68 | 2.00 | 0.56 | NA | NA | NA |
| 648 | 1233 | GTCCTGGTAGCAAAGTCTGG | 2 | 1 | NC | NC | 103.16 | 104.11 | 21.01 | 5.51 | NA | NA | NA |
| 649 | 1234 | AGTCCTGGTAGCAAAGTCTG | 2 | 2 | NC | NC | 29.71 | 22.82 | 2.31 | 17.24 | NA | NA | NA |
| 650 | 1235 | AAGTCCTGGTAGCAAAGTCT | 2 | 1 | NC | NC | 36.20 | 12.72 | 2.05 | 2.73 | NA | NA | NA |
| 651 | 1236 | CAAGTCCTGGTAGCAAAGTC | 2 | 2 | NC | NC | 66.63 | 8.37 | 12.78 | 3.25 | NA | NA | NA |
| 652 | 1237 | GCAAGTCCTGGTAGCAAAGT | 2 | 2 | NC | NC | 103.63 | 96.70 | 3.66 | 11.00 | NA | NA | NA |
| 655 | 1264 | GATTTAACCATCTCCCCAGA | 2 | 2 | NC | NC | 70.20 | 10.46 | 16.79 | 3.94 | NA | NA | NA |
| 699 | 1327 | ATCTGGTGGGCATAGACCTT | 2 | 2 | NC | NC | 30.23 | 7.23 | 13.94 | 2.66 | NA | NA | NA |
| 701 | 1342 | GAATCTGTACGAACCATCTG | 3 | 2 | NC | NC | 45.66 | 8.44 | 5.65 | 1.13 | NA | NA | NA |
| 702 | 1343 | GGAATCTGTACGAACCATCT | 3 | 2 | NC | NC | 27.72 | 21.88 | 6.29 | 2.90 | NA | NA | NA |
| 703 | 1344 | GGGAATCTGTACGAACCATC | 3 | 2 | NC | NC | 24.62 | 19.88 | 7.13 | 3.82 | NA | NA | NA |
| 704 | 1345 | CGGGAATCTGTACGAACCAT | 2 | 2 | NC | NC | 17.58 | 5.61 | 12.65 | 0.43 | 0.43 | 0.89 | 2.07 |
| 705 | 1346 | CCGGGAATCTGTACGAACCA | 2 | 1 | NC | NC | 16.59 | 6.79 | 10.96 | 0.64 | 0.18 | 0.58 | 2.05 |
| 706 | 1348 | TCCCGGGAATCTGTACGAAC | 3 | 2 | NC | NC | 24.79 | 5.60 | 6.98 | 0.72 | NA | NA | NA |
| 707 | 1360 | TCAAGCTTCTGTTCCCGGGA | 2 | 2 | NC | NC | 12.85 | 3.94 | 9.71 | 1.28 | 0.12 | 0.37 | 1.21 |
| 708 | 1361 | ATCAAGCTTCTGTTCCCGGG | 3 | 2 | NC | NC | 18.31 | 4.97 | 12.17 | 1.68 | 0.05 | 0.31 | 2.21 |
| 709 | 1362 | CATCAAGCTTCTGTTCCCGG | 3 | 2 | NC | NC | 21.42 | 3.53 | 15.57 | 1.24 | 0.16 | 0.56 | 2.02 |
| 714 | 1385 | TTTGCTCAGAGGCTGCAGAA | 2 | 2 | NC | NC | 35.98 | 7.53 | 20.55 | 1.36 | NA | NA | NA |
| 715 | 1386 | GTTTGCTCAGAGGCTGCAGA | 2 | 2 | NC | NC | 23.47 | 16.64 | 10.07 | 2.36 | NA | NA | NA |
| 729 | 1436 | AATATCTGTCTTATCCTCTG | 2 | 2 | NC | NC | 32.04 | 9.29 | 15.39 | 1.91 | NA | NA | NA |
| 730 | 1437 | AAATATCTGTCTTATCCTCT | 2 | 2 | NC | NC | 56.32 | 14.47 | 15.52 | 6.36 | NA | NA | NA |
| 731 | 1438 | GAAATATCTGTCTTATCCTC | 2 | 1 | NC | NC | 59.58 | 10.23 | 12.09 | 2.51 | NA | NA | NA |
| 733 | 1440 | TAGAAATATCTGTCTTATCC | 2 | 2 | NC | NC | 58.24 | 6.97 | 14.67 | 1.93 | NA | NA | NA |
| 734 | 1441 | CTAGAAATATCTGTCTTATC | 2 | 2 | NC | NC | 46.68 | 4.87 | 22.95 | 1.53 | NA | NA | NA |
| 735 | 1442 | ACTAGAAATATCTGTCTTAT | 2 | 1 | NC | NC | 64.72 | 20.25 | 12.11 | 2.66 | NA | NA | NA |
| 736 | 1443 | CACTAGAAATATCTGTCTTA | 2 | 2 | NC | NC | 59.89 | 8.56 | 11.79 | 1.46 | NA | NA | NA |
| 737 | 1444 | CCACTAGAAATATCTGTCTT | 2 | 3 | NC | NC | 42.87 | 7.05 | 13.20 | 0.77 | NA | NA | NA |
| 738 | 1445 | GCCACTAGAAATATCTGTCT | 2 | 2 | NC | NC | 19.98 | 7.94 | 12.63 | 0.87 | NA | NA | NA |
| 739 | 1446 | TGCCACTAGAAATATCTGTC | 2 | 2 | NC | NC | 19.72 | 5.09 | 12.98 | 1.18 | 0.30 | 0.88 | 2.79 |
| 740 | 1447 | CTGCCACTAGAAATATCTGT | 2 | 2 | NC | NC | 37.06 | 9.49 | 17.50 | 0.79 | NA | NA | NA |
| 741 | 1448 | CCTGCCACTAGAAATATCTG | 2 | 2 | NC | NC | 83.03 | 28.38 | 11.66 | 10.64 | NA | NA | NA |
| 744 | 1452 | TAGCCCTGCCACTAGAAATA | 2 | 2 | NC | NC | 60.02 | 13.91 | 18.36 | 5.76 | NA | NA | NA |
| 749 | 1471 | ATCTCCTCATCTTGCTGCCT | 2 | 2 | NC | NC | 33.49 | 8.67 | 16.34 | 4.13 | NA | NA | NA |
| 752 | 1476 | CAAGCATCTCCTCATCTTGC | 2 | 2 | NC | NC | 13.59 | 4.15 | 10.09 | 1.06 | 0.25 | 0.75 | 2.33 |
| 753 | 1477 | TCAAGCATCTCCTCATCTTG | 2 | 2 | NC | NC | 27.55 | 4.49 | 15.73 | 1.24 | NA | NA | NA |
| 754 | 1478 | TTCAAGCATCTCCTCATCTT | 2 | 2 | NC | NC | 67.59 | 13.44 | 15.97 | 4.55 | NA | NA | NA |
| 757 | 1481 | GAGTTCAAGCATCTCCTCAT | 2 | 2 | NC | NC | 62.60 | 11.36 | 19.21 | 2.88 | NA | NA | NA |
| 762 | 1510 | TTTTTGGCAGCCACTTCAGC | 2 | 1 | NC | NC | 114.79 | 103.00 | 20.71 | 7.21 | NA | NA | NA |
| 763 | 1511 | ATTTTTGGCAGCCACTTCAG | 2 | 2 | NC | NC | 98.71 | 68.38 | 5.39 | 9.84 | NA | NA | NA |
| 765 | 1513 | TGATTTTTGGCAGCCACTTC | 2 | 2 | NC | NC | 36.01 | 5.20 | 10.64 | 0.75 | NA | NA | NA |
| 766 | 1514 | CTGATTTTTGGCAGCCACTT | 2 | 2 | NC | NC | 30.25 | 4.45 | 8.05 | 1.22 | NA | NA | NA |
| 768 | 1516 | CTCTGATTTTTGGCAGCCAC | 2 | 2 | NC | NC | 13.07 | 4.62 | 1.60 | 0.22 | 0.22 | 0.68 | 3.04 |
| 769 | 1517 | GCTCTGATTTTTGGCAGCCA | 2 | 2 | NC | NC | 8.44 | 8.18 | 1.89 | 0.27 | 0.14 | 0.53 | 2.32 |
| 788 | 1539 | CCTTTGTTGTATCCCCCTCC | 2 | 2 | NC | NC | 20.21 | 4.38 | 5.39 | 1.58 | 0.34 | 1.01 | 3.42 |
| 790 | 1541 | CCCCTTTGTTGTATCCCCCT | 2 | 2 | NC | NC | 20.62 | 5.37 | 3.13 | 0.98 | NA | NA | NA |
| 791 | 1542 | TCCCCTTTGTTGTATCCCCC | 2 | 2 | NC | NC | 23.48 | 7.41 | 3.97 | 2.54 | NA | NA | NA |
| 792 | 1543 | GTCCCCTTTGTTGTATCCCC | 2 | 1 | NC | NC | 100.47 | 88.37 | 8.84 | 6.17 | NA | NA | NA |
| 819 | 1570 | GGTCCTCTCTTCTCTGACAT | 2 | 2 | NC | NC | 58.63 | 11.34 | 7.04 | 2.35 | NA | NA | NA |
| 827 | 1603 | TCCCGATGTCTCTTTCTGGG | 2 | 2 | NC | NC | 16.05 | 3.67 | 9.04 | 0.41 | 0.16 | 0.52 | 1.89 |
| 828 | 1604 | TTCCCGATGTCTCTTTCTGG | 2 | 3 | NC | NC | 33.73 | 4.04 | 13.16 | 0.43 | NA | NA | NA |
| 829 | 1605 | CTTCCCGATGTCTCTTTCTG | 2 | 2 | NC | NC | 53.70 | 8.42 | 13.79 | 0.91 | NA | NA | NA |
| 830 | 1606 | TCTTCCCGATGTCTCTTTCT | 2 | 2 | NC | NC | 77.10 | 8.94 | 15.70 | 1.81 | NA | NA | NA |
| 831 | 1607 | ATCTTCCCGATGTCTCTTTC | 2 | 2 | NC | NC | 60.00 | 8.02 | 12.80 | 2.53 | NA | NA | NA |
| 832 | 1608 | AATCTTCCCGATGTCTCTTT | 2 | 1 | NC | NC | 65.71 | 6.74 | 13.39 | 1.53 | NA | NA | NA |
| 833 | 1609 | GAATCTTCCCGATGTCTCTT | 2 | 2 | NC | NC | 52.67 | 5.55 | 14.38 | 1.31 | NA | NA | NA |
| 834 | 1610 | AGAATCTTCCCGATGTCTCT | 2 | 2 | NC | NC | 46.94 | 8.07 | 12.68 | 0.51 | NA | NA | NA |
| 835 | 1611 | CAGAATCTTCCCGATGTCTC | 3 | 2 | NC | NC | 45.90 | 5.58 | 11.41 | 0.83 | NA | NA | NA |
| 840 | 1617 | CCACATCAGAATCTTCCCGA | 2 | 2 | NC | NC | 42.29 | 6.08 | 12.23 | 0.95 | NA | NA | NA |
| 841 | 1618 | TCCACATCAGAATCTTCCCG | 2 | 2 | NC | NC | 23.05 | 8.39 | 1.20 | 4.40 | NA | NA | NA |
| 842 | 1619 | TTCCACATCAGAATCTTCCC | 2 | 2 | NC | NC | 38.94 | 8.19 | 2.71 | 1.41 | NA | NA | NA |
| 845 | 1622 | CATTTCCACATCAGAATCTT | 2 | 3 | NC | NC | 80.41 | 16.41 | 4.15 | 3.07 | NA | NA | NA |
| 847 | 1624 | ACCATTTCCACATCAGAATC | 2 | 2 | NC | NC | 68.04 | 10.71 | 5.25 | 0.84 | NA | NA | NA |
| 850 | 1627 | TCCACCATTTCCACATCAGA | 2 | 2 | 2 | NC | 35.73 | 7.84 | 4.97 | 0.77 | NA | NA | NA |
| 852 | 1629 | CTTCCACCATTTCCACATCA | 2 | 3 | NC | NC | 50.97 | 15.33 | 2.65 | 2.10 | NA | NA | NA |
| 853 | 1630 | TCTTCCACCATTTCCACATC | 2 | 2 | NC | NC | 69.10 | 22.59 | 9.13 | 3.49 | NA | NA | NA |
| 857 | 1634 | ATCATCTTCCACCATTTCCA | 2 | 3 | NC | NC | 56.50 | 17.20 | 3.57 | 2.80 | NA | NA | NA |
| 859 | 1636 | GAATCATCTTCCACCATTTC | 2 | 2 | NC | NC | 51.18 | 9.63 | 4.18 | 0.25 | NA | NA | NA |
| 861 | 1655 | TGCAGTCATTTCCTTTCGGG | 2 | 2 | NC | NC | 8.10 | 4.68 | 1.74 | 0.31 | 0.16 | 0.47 | 1.74 |
| 866 | 1660 | CAAGCTGCAGTCATTTCCTT | 2 | 2 | NC | NC | 31.03 | 5.85 | 5.88 | 1.02 | NA | NA | NA |
| 867 | 1661 | ACAAGCTGCAGTCATTTCCT | 2 | 1 | NC | NC | 32.41 | 5.48 | 10.00 | 0.49 | NA | NA | NA |
| 868 | 1662 | TACAAGCTGCAGTCATTTCC | 2 | 2 | NC | NC | 41.44 | 6.10 | 8.54 | 1.49 | NA | NA | NA |
| 869 | 1663 | GTACAAGCTGCAGTCATTTC | 2 | 2 | NC | NC | 31.87 | 5.92 | 9.46 | 0.78 | NA | NA | NA |
| 870 | 1664 | GGTACAAGCTGCAGTCATTT | 2 | 2 | NC | NC | 19.62 | 6.14 | 4.64 | 0.99 | NA | NA | NA |
| 871 | 1665 | GGGTACAAGCTGCAGTCATT | 2 | 2 | NC | NC | 11.39 | 7.58 | 0.71 | 1.44 | 0.13 | 0.76 | 4.61 |
| 872 | 1685 | GTTAATGATCCTTCTCCGGG | 3 | 2 | NC | NC | 16.00 | 7.44 | 2.40 | 0.54 | 0.10 | 0.60 | 3.62 |
| 877 | 1690 | GTGAGGTTAATGATCCTTCT | 2 | 1 | NC | NC | 13.70 | 6.50 | 1.42 | 0.79 | 0.27 | 0.86 | 3.52 |
| 878 | 1691 | AGTGAGGTTAATGATCCTTC | 2 | 2 | NC | NC | 13.57 | 5.41 | 2.04 | 0.84 | 0.36 | 1.09 | 4.03 |
| 879 | 1692 | TAGTGAGGTTAATGATCCTT | 2 | 1 | NC | NC | 19.27 | 5.60 | 2.90 | 0.43 | 0.33 | 1.28 | 5.18 |
| 880 | 1693 | CTAGTGAGGTTAATGATCCT | 2 | 1 | NC | NC | 26.95 | 8.81 | 6.37 | 2.31 | NA | NA | NA |
| 881 | 1694 | ACTAGTGAGGTTAATGATCC | 2 | 1 | NC | NC | 19.52 | 9.33 | 1.78 | 2.03 | NA | NA | NA |
| 882 | 1695 | CACTAGTGAGGTTAATGATC | 2 | 2 | NC | NC | 18.49 | 6.98 | 3.33 | 2.10 | 0.20 | 0.70 | 2.77 |
| 884 | 1708 | TGGAGACTCAAAACACTAGT | 2 | 2 | NC | NC | 19.02 | 7.16 | 5.41 | 3.14 | NA | NA | NA |
| 885 | 1709 | CTGGAGACTCAAAACACTAG | 2 | 2 | NC | NC | 12.85 | 4.67 | 1.06 | 1.02 | 0.18 | 0.57 | 2.04 |
| 886 | 1710 | CCTGGAGACTCAAAACACTA | 2 | 1 | NC | NC | 16.65 | 5.77 | 2.87 | 1.31 | 0.25 | 0.85 | 3.32 |
| 887 | 1711 | TCCTGGAGACTCAAAACACT | 2 | 2 | NC | NC | 21.75 | 5.92 | 2.38 | 1.14 | NA | NA | NA |
| 889 | 1713 | CTTCCTGGAGACTCAAAACA | 2 | 2 | NC | NC | 45.46 | 9.02 | 3.36 | 1.57 | NA | NA | NA |
| 890 | 1714 | TCTTCCTGGAGACTCAAAAC | 2 | 2 | NC | NC | 50.79 | 12.75 | 4.92 | 7.80 | NA | NA | NA |
| 891 | 1715 | TTCTTCCTGGAGACTCAAAA | 2 | 1 | NC | NC | 93.36 | 103.76 | 4.23 | 9.89 | NA | NA | NA |
| 893 | 1717 | ATTTCTTCCTGGAGACTCAA | 2 | 2 | NC | NC | 55.08 | 6.98 | 5.19 | 0.87 | NA | NA | NA |
| 894 | 1718 | AATTTCTTCCTGGAGACTCA | 2 | 2 | NC | NC | 61.08 | 7.27 | 12.91 | 0.98 | NA | NA | NA |
| 901 | 1725 | GCTCATTAATTTCTTCCTGG | 2 | 2 | NC | NC | 20.13 | 5.24 | 3.78 | 0.52 | 0.09 | 0.53 | 2.92 |
| 923 | 1762 | TGGTTATGCAACATCTCCCG | 2 | 1 | NC | NC | 17.35 | 18.34 | 5.47 | 1.94 | NA | NA | NA |
| 924 | 1763 | GTGGTTATGCAACATCTCCC | 2 | 2 | NC | NC | 16.20 | 19.58 | 4.19 | 1.63 | NA | NA | NA |
| 925 | 1764 | AGTGGTTATGCAACATCTCC | 2 | 2 | NC | NC | 23.69 | 18.86 | 5.61 | 1.94 | NA | NA | NA |
| 926 | 1765 | GAGTGGTTATGCAACATCTC | 2 | 2 | NC | NC | 20.41 | 17.59 | 3.21 | 2.30 | NA | NA | NA |
| 927 | 1766 | GGAGTGGTTATGCAACATCT | 2 | 1 | NC | NC | 17.13 | 17.59 | 2.07 | 2.18 | NA | NA | NA |
| 928 | 1767 | AGGAGTGGTTATGCAACATC | 2 | 1 | NC | NC | 23.83 | 14.79 | 3.38 | 1.89 | NA | NA | NA |
| 929 | 1768 | AAGGAGTGGTTATGCAACAT | 2 | 2 | NC | NC | 42.95 | 13.46 | 5.84 | 1.42 | NA | NA | NA |
| 930 | 1769 | GAAGGAGTGGTTATGCAACA | 2 | 1 | NC | NC | 41.94 | 14.80 | 3.77 | 4.79 | NA | NA | NA |
| 931 | 1770 | CGAAGGAGTGGTTATGCAAC | 2 | 1 | NC | NC | 23.28 | 9.91 | 4.22 | 1.39 | NA | NA | NA |
| 936 | 1789 | TGAGGATTCACACAGCCCAC | 2 | 2 | 2 | 2 | 17.04 | 13.00 | 2.05 | 1.38 | NA | NA | NA |
| 937 | 1790 | CTGAGGATTCACACAGCCCA | 2 | 2 | 1 | 1 | 15.87 | 12.83 | 1.05 | 0.64 | NA | NA | NA |
| 938 | 1791 | ACTGAGGATTCACACAGCCC | 2 | 2 | 2 | 2 | 18.66 | 12.90 | 1.15 | 2.32 | NA | NA | NA |
| 939 | 1792 | CACTGAGGATTCACACAGCC | 2 | NC | 2 | 2 | 31.16 | 9.98 | 2.79 | 1.29 | NA | NA | NA |
| 975 | 1855 | AGTTCTTCACTAAGCTTGGT | 2 | 2 | NC | NC | 29.52 | 19.93 | 4.25 | 1.72 | NA | NA | NA |
| 977 | 1857 | ACAGTTCTTCACTAAGCTTG | 2 | 2 | NC | NC | 39.47 | 11.25 | 3.26 | 0.49 | NA | NA | NA |
| 981 | 1874 | AATGAGTATCTGGTAGAACA | 2 | 2 | 2 | NC | 33.56 | 13.02 | 2.09 | 1.89 | NA | NA | NA |
| 982 | 1875 | AAATGAGTATCTGGTAGAAC | 2 | 2 | 2 | NC | 49.15 | 8.98 | 12.33 | 2.27 | NA | NA | NA |
| 983 | 1876 | TAAATGAGTATCTGGTAGAA | 1 | 1 | 2 | 1 | 55.92 | 10.30 | 5.29 | 2.68 | NA | NA | NA |
| 984 | 1877 | ATAAATGAGTATCTGGTAGA | 1 | 2 | 1 | NC | 38.93 | 8.65 | 9.76 | 0.97 | NA | NA | NA |
| 985 | 1878 | CATAAATGAGTATCTGGTAG | 2 | 2 | 1 | NC | 21.43 | 8.65 | 2.82 | 0.30 | NA | NA | NA |
| 986 | 1879 | TCATAAATGAGTATCTGGTA | 2 | 2 | 2 | NC | 14.28 | 7.79 | 1.81 | 0.61 | 0.29 | 0.77 | 2.32 |
| 1019 | 1962 | TCTCTGGACTATCTAAGGCA | 2 | 2 | NC | NC | 22.18 | 9.04 | 3.66 | 1.64 | NA | NA | NA |
| 1023 | 1979 | TTCCTCTGTCCAGCCACTCT | 2 | 1 | NC | NC | 50.08 | 15.27 | 4.30 | 3.94 | NA | NA | NA |
| 1024 | 1981 | TCTTCCTCTGTCCAGCCACT | 2 | 2 | NC | NC | 44.05 | 13.91 | 9.38 | 2.13 | NA | NA | NA |
| 1025 | 1982 | ATCTTCCTCTGTCCAGCCAC | 2 | 2 | NC | NC | 37.17 | 11.97 | 2.26 | 1.04 | NA | NA | NA |
| 1026 | 1983 | CATCTTCCTCTGTCCAGCCA | 2 | 1 | NC | NC | 32.70 | 11.63 | 4.73 | 0.83 | NA | NA | NA |
| 1027 | 1985 | ACCATCTTCCTCTGTCCAGC | 2 | 2 | NC | NC | 50.53 | 26.55 | 3.60 | 11.81 | NA | NA | NA |
| 1028 | 1986 | GACCATCTTCCTCTGTCCAG | 2 | 2 | NC | NC | 21.33 | 16.03 | 3.72 | 5.90 | NA | NA | NA |
| 1029 | 1989 | TGGGACCATCTTCCTCTGTC | 2 | 2 | NC | NC | 19.62 | 18.29 | 3.08 | 1.29 | NA | NA | NA |
| 1030 | 1990 | TTGGGACCATCTTCCTCTGT | 2 | 2 | NC | NC | 22.13 | 16.50 | 4.81 | 1.37 | NA | NA | NA |
| 1031 | 1991 | TTTGGGACCATCTTCCTCTG | 2 | 2 | NC | NC | 22.09 | 15.25 | 4.49 | 0.96 | NA | NA | NA |
| 1032 | 1992 | CTTTGGGACCATCTTCCTCT | 2 | 1 | NC | NC | 28.68 | 15.17 | 4.36 | 3.55 | NA | NA | NA |
| 1034 | 1994 | TTCTTTGGGACCATCTTCCT | 2 | 2 | NC | NC | 60.24 | 14.44 | 3.65 | 4.90 | NA | NA | NA |
| 1036 | 1996 | CCTTCTTTGGGACCATCTTC | 2 | 2 | NC | NC | 48.98 | 12.78 | 3.77 | 4.72 | NA | NA | NA |
| 1037 | 1997 | TCCTTCTTTGGGACCATCTT | 2 | 1 | NC | NC | 52.70 | 12.42 | 9.46 | 1.56 | NA | NA | NA |
| 1038 | 2004 | CAGCAAGTCCTTCTTTGGGA | 2 | 2 | NC | NC | 10.45 | 9.16 | 1.21 | 2.08 | 0.08 | 0.28 | 1.26 |
| 1039 | 2005 | TCAGCAAGTCCTTCTTTGGG | 2 | 2 | NC | NC | 20.27 | 8.64 | 1.87 | 2.15 | NA | NA | NA |
| 1040 | 2006 | TTCAGCAAGTCCTTCTTTGG | 2 | 1 | NC | NC | 27.79 | 11.33 | 4.38 | 2.46 | NA | NA | NA |
| 1041 | 2007 | ATTCAGCAAGTCCTTCTTTG | 2 | 2 | NC | NC | 33.30 | 14.07 | 3.99 | 1.39 | NA | NA | NA |
| 1083 | 2056 | AAATAGTCTGCAAGCATCTC | 1 | 2 | 2 | NC | 41.38 | 11.90 | 4.33 | 0.52 | NA | NA | NA |
| 1084 | 2057 | GAAATAGTCTGCAAGCATCT | 2 | 2 | 2 | 2 | 38.58 | 13.29 | 10.20 | 0.46 | NA | NA | NA |
| 1085 | 2058 | AGAAATAGTCTGCAAGCATC | 2 | 2 | 2 | 2 | 29.84 | 12.15 | 4.81 | 1.58 | NA | NA | NA |
| 1086 | 2059 | GAGAAATAGTCTGCAAGCAT | 2 | 2 | 2 | 3 | 27.63 | 15.67 | 4.88 | 0.97 | NA | NA | NA |
| 1087 | 2060 | AGAGAAATAGTCTGCAAGCA | 1 | NC | 2 | 2 | 33.86 | 14.04 | 6.29 | 1.40 | NA | NA | NA |
| 1089 | 2062 | AAAGAGAAATAGTCTGCAAG | 2 | 2 | NC | NC | 58.41 | 17.12 | 7.29 | 1.75 | NA | NA | NA |
| 1101 | 2081 | CCCTTCCTCATCAATTTCCA | 2 | 1 | NC | NC | 31.25 | 15.64 | 3.22 | 3.31 | NA | NA | NA |
| 1104 | 2084 | GTTCCCTTCCTCATCAATTT | 2 | 2 | NC | NC | 57.38 | 29.32 | 9.91 | 8.48 | NA | NA | NA |
| 1105 | 2085 | GGTTCCCTTCCTCATCAATT | 2 | 2 | NC | NC | 53.96 | 27.59 | 5.68 | 2.75 | NA | NA | NA |
| 1107 | 2087 | CAGGTTCCCTTCCTCATCAA | 2 | 2 | NC | NC | 49.11 | 27.64 | 7.95 | 7.29 | NA | NA | NA |
| 1109 | 2089 | ATCAGGTTCCCTTCCTCATC | 2 | 1 | 2 | 2 | 37.95 | 16.43 | 3.84 | 2.36 | NA | NA | NA |
| 1110 | 2090 | AATCAGGTTCCCTTCCTCAT | 2 | 2 | 2 | 1 | 66.42 | 16.39 | 6.57 | 1.24 | NA | NA | NA |
| 1111 | 2091 | CAATCAGGTTCCCTTCCTCA | 1 | 2 | 1 | 1 | 68.17 | 14.98 | 7.69 | 1.22 | NA | NA | NA |
| 1112 | 2092 | CCAATCAGGTTCCCTTCCTC | 2 | 2 | 1 | 1 | 55.69 | 19.51 | 3.53 | 1.71 | NA | NA | NA |
| 1118 | 2122 | GGCACATAGTTGTCAATCAG | 2 | 1 | NC | NC | 21.89 | 18.52 | 0.89 | 1.27 | NA | NA | NA |
| 1119 | 2123 | GGGCACATAGTTGTCAATCA | 2 | 3 | NC | NC | 20.24 | 17.60 | 1.01 | 2.95 | NA | NA | NA |
| 1120 | 2151 | GAATGAAGATAGGCAGTCCC | 2 | NC | 2 | 2 | 50.96 | 24.90 | 7.53 | 4.47 | NA | NA | NA |
| 1121 | 2152 | AGAATGAAGATAGGCAGTCC | 1 | 2 | 2 | 2 | 58.01 | 24.14 | 9.59 | 1.04 | NA | NA | NA |
| 1122 | 2153 | AAGAATGAAGATAGGCAGTC | 1 | 2 | 2 | 2 | 53.74 | 21.10 | 4.80 | 1.67 | NA | NA | NA |
| 1123 | 2154 | GAAGAATGAAGATAGGCAGT | 2 | 2 | 2 | 1 | 38.75 | 25.89 | 4.63 | 5.64 | NA | NA | NA |
| 1131 | 2186 | TTCTTCGTCCCAATTCACCT | 2 | 2 | NC | NC | 38.44 | 15.09 | 1.32 | 1.88 | NA | NA | NA |
| 1132 | 2187 | TTTCTTCGTCCCAATTCACC | 2 | 2 | NC | NC | 58.53 | 13.07 | 4.21 | 1.69 | NA | NA | NA |
| 1133 | 2188 | TTTTCTTCGTCCCAATTCAC | 2 | 2 | NC | NC | 62.52 | 11.90 | 2.87 | 2.21 | NA | NA | NA |
| 1134 | 2189 | CTTTTCTTCGTCCCAATTCA | 2 | 1 | NC | NC | 50.58 | 14.22 | 3.94 | 1.36 | NA | NA | NA |
| 1136 | 2191 | TCCTTTTCTTCGTCCCAATT | 2 | 2 | NC | NC | 29.80 | 9.87 | 5.01 | 1.91 | NA | NA | NA |
| 1138 | 2193 | ATTCCTTTTCTTCGTCCCAA | 2 | 2 | NC | NC | 24.10 | 9.76 | 1.86 | 1.37 | NA | NA | NA |
| 1139 | 2194 | CATTCCTTTTCTTCGTCCCA | 2 | 2 | NC | NC | 24.26 | 12.60 | 2.76 | 1.60 | NA | NA | NA |
| 1140 | 2195 | ACATTCCTTTTCTTCGTCCC | 2 | 2 | NC | NC | 23.58 | 13.32 | 3.03 | 1.54 | NA | NA | NA |
| 1141 | 2196 | AACATTCCTTTTCTTCGTCC | 2 | 2 | NC | NC | 27.14 | 15.58 | 5.19 | 6.93 | NA | NA | NA |
| 1142 | 2197 | AAACATTCCTTTTCTTCGTC | 2 | 2 | NC | NC | 41.22 | 12.84 | 5.46 | 2.51 | NA | NA | NA |
| 1143 | 2198 | AAAACATTCCTTTTCTTCGT | 2 | 2 | NC | NC | 50.01 | 16.16 | 2.75 | 1.08 | NA | NA | NA |
| 1144 | 2199 | CAAAACATTCCTTTTCTTCG | 2 | 1 | NC | NC | 58.85 | 17.98 | 2.27 | 4.10 | NA | NA | NA |
| 1151 | 2206 | AGGCTTTCAAAACATTCCTT | 2 | 2 | NC | NC | 15.91 | 23.64 | 1.46 | 4.96 | NA | NA | NA |
| 1152 | 2207 | GAGGCTTTCAAAACATTCCT | 2 | 2 | NC | NC | 15.81 | 17.27 | 0.99 | 1.57 | NA | NA | NA |
| 1161 | 2216 | TTCTTTACTGAGGCTTTCAA | 2 | 2 | NC | NC | 53.76 | 11.00 | 4.27 | 0.65 | NA | NA | NA |
| 1162 | 2217 | ATTCTTTACTGAGGCTTTCA | 2 | 3 | NC | NC | 38.54 | 11.47 | 4.34 | 0.84 | NA | NA | NA |
| 1163 | 2218 | CATTCTTTACTGAGGCTTTC | 2 | 2 | NC | NC | 31.98 | 13.25 | 2.97 | 6.33 | NA | NA | NA |
| 1186 | 2252 | TATGTACTGCTTCCGGATGG | 2 | 2 | NC | NC | 95.26 | 56.34 | 6.20 | 3.23 | NA | NA | NA |
| 1187 | 2253 | ATATGTACTGCTTCCGGATG | 3 | 2 | NC | NC | 28.54 | 16.64 | 3.08 | 0.51 | NA | NA | NA |
| 1188 | 2254 | GATATGTACTGCTTCCGGAT | 3 | 2 | NC | NC | 14.73 | 12.13 | 1.00 | 1.15 | NA | NA | NA |
| 1189 | 2255 | AGATATGTACTGCTTCCGGA | 3 | 2 | NC | NC | 13.10 | 15.70 | 2.36 | 1.00 | NA | NA | NA |
| 1190 | 2256 | CAGATATGTACTGCTTCCGG | 3 | 3 | NC | NC | 13.11 | 17.10 | 2.53 | 1.89 | NA | NA | NA |
| 1191 | 2257 | TCAGATATGTACTGCTTCCG | 2 | 1 | NC | NC | 17.38 | 16.72 | 2.61 | 4.11 | NA | NA | NA |
| 1192 | 2258 | CTCAGATATGTACTGCTTCC | 2 | 2 | NC | NC | 69.79 | 31.46 | 8.14 | 3.15 | NA | NA | NA |
| 1194 | 2260 | TCCTCAGATATGTACTGCTT | 2 | 2 | NC | NC | 16.09 | 11.05 | 2.51 | 0.85 | NA | NA | NA |
| 1195 | 2261 | CTCCTCAGATATGTACTGCT | 2 | 2 | NC | NC | 25.07 | 9.13 | 4.41 | 1.25 | NA | NA | NA |
| 1197 | 2264 | CGACTCCTCAGATATGTACT | 2 | 1 | NC | NC | 24.65 | 17.60 | 4.57 | 1.73 | NA | NA | NA |
| 1199 | 2266 | GTCGACTCCTCAGATATGTA | 3 | 2 | NC | NC | 28.41 | 15.85 | 10.67 | 1.47 | NA | NA | NA |
| 1200 | 2267 | GGTCGACTCCTCAGATATGT | 3 | 2 | NC | NC | 21.13 | 23.68 | 5.91 | 8.80 | NA | NA | NA |
| 1201 | 2268 | GGGTCGACTCCTCAGATATG | 3 | 2 | NC | NC | 20.89 | 20.52 | 1.26 | 3.02 | NA | NA | NA |
| 1204 | 2302 | ATGGAGCCAGGCACTTCACT | 2 | 1 | NC | NC | 19.49 | 21.47 | 2.53 | 2.55 | NA | NA | NA |
| 1205 | 2303 | AATGGAGCCAGGCACTTCAC | 2 | 2 | NC | NC | 93.76 | 101.43 | 5.12 | 3.90 | NA | NA | NA |
| 1207 | 2306 | TGGAATGGAGCCAGGCACTT | 2 | 3 | NC | NC | 29.60 | 12.81 | 6.39 | 1.54 | NA | NA | NA |
| 1209 | 2309 | GTTTGGAATGGAGCCAGGCA | 2 | 2 | NC | NC | 16.63 | 15.24 | 1.52 | 1.59 | NA | NA | NA |
| 1214 | 2314 | CAGGAGTTTGGAATGGAGCC | 2 | 3 | NC | NC | 21.19 | 27.52 | 1.29 | 6.83 | NA | NA | NA |
| 1215 | 2324 | AGTCCACTTCCAGGAGTTTG | 2 | 2 | NC | NC | 26.71 | 20.02 | 1.48 | 1.35 | NA | NA | NA |
| 1216 | 2325 | CAGTCCACTTCCAGGAGTTT | 2 | 2 | NC | NC | 31.06 | 18.06 | 2.49 | 1.71 | NA | NA | NA |
| 1218 | 2329 | TCCACAGTCCACTTCCAGGA | 2 | 2 | NC | NC | 11.76 | 17.94 | 1.42 | 2.33 | NA | NA | NA |
| 1220 | 2331 | GTTCCACAGTCCACTTCCAG | 2 | 3 | NC | NC | 19.73 | 20.38 | 3.60 | 2.39 | NA | NA | NA |
| 1221 | 2332 | TGTTCCACAGTCCACTTCCA | 2 | 2 | NC | NC | 24.30 | 16.77 | 5.32 | 1.82 | NA | NA | NA |
| 1222 | 2333 | GTGTTCCACAGTCCACTTCC | 2 | 2 | NC | NC | 19.42 | 20.48 | 2.47 | 2.57 | NA | NA | NA |
| 1223 | 2334 | TGTGTTCCACAGTCCACTTC | 2 | 1 | NC | NC | 18.25 | 19.92 | 3.39 | 1.35 | NA | NA | NA |
| 1239 | 2385 | CTGTGAAATGTTTAGGAGGC | 2 | 2 | NC | NC | 17.75 | 16.86 | 2.28 | 1.34 | NA | NA | NA |
| 1240 | 2386 | TCTGTGAAATGTTTAGGAGG | 2 | 2 | NC | NC | 24.18 | 18.40 | 4.91 | 1.27 | NA | NA | NA |
| 1241 | 2387 | TTCTGTGAAATGTTTAGGAG | 2 | 2 | NC | NC | 22.14 | 10.77 | 4.67 | 1.23 | NA | NA | NA |
| 1244 | 2390 | ATCTTCTGTGAAATGTTTAG | 2 | 2 | NC | NC | 26.27 | 13.45 | 4.96 | 0.97 | NA | NA | NA |
| 1247 | 2393 | TCCATCTTCTGTGAAATGTT | 2 | 2 | NC | NC | 13.38 | 12.40 | 2.16 | 1.25 | NA | NA | NA |
| 1257 | 2427 | ATAGATCAGGCAGGTTAGCA | 2 | 1 | NC | NC | 19.89 | 12.32 | 2.46 | 1.14 | NA | NA | NA |
| 1258 | 2428 | TATAGATCAGGCAGGTTAGC | 2 | 3 | NC | NC | 14.37 | 13.81 | 1.03 | 0.70 | NA | NA | NA |
| 1259 | 2429 | GTATAGATCAGGCAGGTTAG | 2 | 2 | NC | NC | 14.45 | 11.68 | 2.07 | 0.68 | NA | NA | NA |
| 1260 | 2430 | TGTATAGATCAGGCAGGTTA | 2 | 2 | NC | NC | 87.68 | 94.97 | 8.52 | 4.62 | NA | NA | NA |
| 1262 | 2432 | TTTGTATAGATCAGGCAGGT | 2 | 2 | NC | NC | 20.44 | 14.15 | 1.28 | 0.62 | NA | NA | NA |
| 1263 | 2433 | CTTTGTATAGATCAGGCAGG | 2 | 2 | NC | NC | 13.38 | 11.53 | 0.70 | 0.95 | 0.14 | 0.55 | 5.60 |
| 1264 | 2434 | ACTTTGTATAGATCAGGCAG | 2 | 2 | NC | NC | 13.58 | 13.18 | 0.30 | 1.02 | NA | NA | NA |
| 1265 | 2435 | GACTTTGTATAGATCAGGCA | 2 | 2 | NC | NC | 11.27 | 11.30 | 0.53 | 1.50 | 0.07 | 0.33 | 2.30 |
| 1266 | 2436 | AGACTTTGTATAGATCAGGC | 3 | 2 | NC | NC | 10.32 | 10.49 | 1.98 | 2.17 | 0.05 | 0.15 | 0.72 |
| 1267 | 2437 | AAGACTTTGTATAGATCAGG | 2 | 2 | NC | NC | 14.64 | 10.64 | 3.42 | 0.73 | 0.08 | 0.42 | 3.39 |
| 1268 | 2438 | AAAGACTTTGTATAGATCAG | 2 | 1 | NC | NC | 27.08 | 13.81 | 5.51 | 4.33 | NA | NA | NA |
| 1269 | 2439 | CAAAGACTTTGTATAGATCA | 2 | 2 | NC | NC | 17.03 | 11.10 | 11.35 | 2.93 | NA | NA | NA |
| 1270 | 2449 | TAACACCTCTCAAAGACTTT | 2 | 1 | NC | NC | 46.54 | 21.29 | 5.71 | 9.16 | NA | NA | NA |
| 1273 | 2452 | ATTTAACACCTCTCAAAGAC | 2 | 3 | NC | NC | 51.39 | 22.12 | 7.97 | 6.64 | NA | NA | NA |
| 1274 | 2453 | TATTTAACACCTCTCAAAGA | 2 | 2 | NC | NC | 63.35 | 21.72 | 10.62 | 11.87 | NA | NA | NA |
| 1275 | 2454 | ATATTTAACACCTCTCAAAG | 2 | 3 | NC | NC | 56.98 | 20.59 | 6.68 | 4.03 | NA | NA | NA |
| 1277 | 2456 | CCATATTTAACACCTCTCAA | 2 | 2 | NC | NC | 30.16 | 12.91 | 6.23 | 5.01 | NA | NA | NA |
| 1278 | 2457 | ACCATATTTAACACCTCTCA | 2 | 1 | NC | NC | 22.23 | 13.08 | 2.74 | 4.47 | NA | NA | NA |
| 1314 | 2513 | CAACACTTTGTATCGGAATA | 3 | 1 | NC | NC | 27.79 | 11.30 | 2.74 | 2.91 | NA | NA | NA |
| 1315 | 2524 | ACACTTTGATACAACACTTT | 2 | 2 | NC | NC | 27.55 | 10.61 | 6.34 | 2.30 | NA | NA | NA |
| 1343 | 2576 | AAGTATAAGTCTTAAGTGCT | 2 | 2 | NC | NC | 45.01 | 19.13 | 5.01 | 2.14 | NA | NA | NA |

### Example 3. In Vitro Screen for Reduced Expansion

[0423] Expansion of DNA triplet repeats can be replicated in vitro using patient-derived cells lines and DNA-damaging agents. Human fibroblasts from Huntington's (GM04281, GM04687 and GM04212) or Friedreich's Ataxia patients (GM03816 and GM02153) or Myotonic dystrophy) (GM04602, GM03987 and GM03989) are purchased from Coriell Cell Repositories and are maintained in medium following the manufacturer's instructions (Kovtum et al., 2007 Nature, 447(7143): 447-452; Li et al., 2016 Biopreservation and Biobanking 14(4):324-29; Zhang et al., 2013 Mol Ther 22(2): 312-320). To induce CAG-repeat expansion in vitro, fibroblast cells are treated with oxidizing agents such as hydrogen peroxide (H₂O₂), potassium chromate (K2CrO₄) or potassium bromate (KBrO₃) for up to 2 hrs (Kovtum et al., ibid). Cells are washed, and medium replace to allow cells to recover for 3 days. The treatment is repeated up to twice more before cells are harvested and DNA isolated. CAG repeat length is determined using methods described below. The effect of dsRNA agents on altering CAG-repeat expansion is measured at different concentrations is compared with controls (mock-transfected and/or control dsRNA at the same concentration as the experimental agent).

[0424] Expansion of DNA triplet repeats can be replicated in vitro using patient-derived cell lines. Induced pluripotent stem cells (iPSC) derived from Human fibroblasts from Huntington's Patients (CS09iHD-109n1) are purchased from Cedars-Sinai RMI Induced Pluripotent Stem Cell Core and are maintained following the manufacturer's recommendations (https://www.cedars-sinai.org/content/dam/cedars-sinai/research/documents/biomanufacturing/recommended-guidelines-for-handling-ipscsv1.pdf). The CAG repeat from an iPSC line with 109 CAGs shows an increase in CAG repeat size over time, with an average expansion of 4 CAG repeats over 70 days in dividing iPS cells (Goold et al., 2019 Human Molecular Genetics February 15; 28(4): 650-661).

[0425] CS09iHD-109n1 iPSC are treated with either LNP-formulated siRNA or ASO for continuous knockdown of target mRNA and CAG repeat expansion is determined by DNA fragment analysis described below. SiRNAs or ASOs are added to cells in varying concentrations every 3 to 15 days and knockdown of mRNA is determined by RT-qPCR using standard molecular biology techniques. DNA and mRNA are isolated from cells according to standard techniques at t=0.14 days, 28 days, 42 days, 56 days and 80 days. The differences in expansion between treatment and control are compared according to a linear repeated-measures model, and at each time point according to Tukey's post-hoc tests.

### Example 4. In Vitro Screening of MLH1 Knockdown

[0426] Inhibition or knockdown of MLH1 can be demonstrated using a cell-based assay. For example, HEK293, NIH3T3, or Hela or another available mammalian cell line with dsRNA agents targeting MLH1 identified above in Example 1 using at least five different dose levels, using transfection reagents such as lipofectamine 2000 (Invitrogen) following the manufacturer's instructions. Cells are harvested at multiple time points up to 7 days post transfection for either mRNA or protein analyses. Knockdown of mRNA and protein are determined by RT-qPCR or western blot analyses respectively, using standard molecular biology techniques as previously described (see, for example, as described in Drouet et al., 2014, PLOS One 9(6): e99341). The relative levels of the MLH1 mRNA and protein at the different dsRNA levels are compared with a mock oligonucleotide control.

[0427] Some siRNA duplexes were evaluated through mRNA knockdown at 10 nM and 0.5 nM, 24 hours after transfection of HeLa cells. The extent of mRNA knockdown by the siRNA duplexes was analyzed by quantitative reverse transcription polymerase chain reaction (RT-qPCR) using TaqMan Gene Expression probes. mRNA expression was calculated via delta-delta Ct(ΔΔCT) method were target expression was doubly normalized to express of the reference gene beta-glucuronidase (GUSB) and cells treated with non-targeting control siRNA.

[0428] In Table 13 below, the 3′ U of the antisense oligonucleotide can be any nucleotide (e.g., U, A, G, C, T). In some aspects, the 3′ U of the antisense oligonucleotide in Table 13 is U.

TABLE 13

| | | | | | | | | mean % mRNA | | SD % mRNA | |
|---|---|---|---|---|---|---|---|---|---|---|---|
| SEQ | | | SEQ | | | | | remaining | | remaining | |
| ID NO | Sense | Antis | ID NO | Pos | Cyno | Mouse | Rat | 0.5 nM | 10 nM | 0.5 nM | 10 nM |
| 1418 | GUUGAGAAAUUUGACUGGA | UCCAGUCAAAUUUCUCAAC | 1419 | 24 | Yes | No | No | 93.57 | 96.04 | 16.45 | 13.53 |
| 1424 | UUGACUGGCAUUCAAGCUA | UAGCUUGAAUGCCAGUCAA | 1425 | 34 | Yes | No | No | 84.26 | 81.83 | 2.35 | 4.03 |
| 1486 | GGCACUUCCGUUGAGCAUA | UAUGCUCAACGGAAGUGCC | 1487 | 149 | Yes | No | No | 74.89 | 77.21 | 10.69 | 9.46 |
| 1492 | UUCCGUUGAGCAUCUAGAA | UUCUAGAUGCUCAACGGAA | 1493 | 154 | Yes | No | No | 70.80 | 71.54 | 4.18 | 4.35 |
| 1494 | CCGUUGAGCAUCUAGACGA | UCGUCUAGAUGCUCAACGG | 1495 | 156 | Yes | No | No | 68.36 | 76.85 | 34.25 | 3.81 |
| 1496 | CGUUGAGCAUCUAGACGUA | UACGUCUAGAUGCUCAACG | 1497 | 157 | Yes | No | No | 73.04 | 75.42 | 6.64 | 15.70 |
| 1514 | GGCGCCAAAAUGUCGUUCA | UGAACGACAUUUUGGCGCC | 1515 | 190 | Yes | No | No | 72.07 | 53.44 | 6.64 | 9.75 |
| 1516 | CGCCAAAAUGUCGUUCGUA | UACGAACGACAUUUUGGCG | 1517 | 192 | Yes | No | No | 52.78 | 57.01 | 6.55 | 20.77 |
| 1520 | GUUCGUGGCAGGGGUUAUA | UAUAACCCCUGCCACGAAC | 1521 | 204 | Yes | No | No | 101.97 | 103.73 | 17.37 | 30.90 |
| 1534 | GACGAGACAGUGGUGAACA | UGUUCACCACUGUCUCGUC | 1535 | 232 | Yes | No | No | 97.77 | 94.78 | 17.23 | 37.47 |
| 1536 | UAUCCAGCGGCCAGCUAAA | UUUAGCUGGCCGCUGGAUA | 1537 | 270 | Yes | No | No | 53.67 | 46.12 | 6.09 | 2.32 |
| 1544 | GCCAGCUAAUGCUAUCAAA | UUUGAUAGCAUUAGCUGGC | 1545 | 279 | Yes | No | No | 51.95 | 40.60 | 1.45 | 6.83 |
| 1546 | CCAGCUAAUGCUAUCAAAA | UUUUGAUAGCAUUAGCUGG | 1547 | 280 | Yes | No | No | 41.77 | 37.24 | 6.69 | 3.42 |
| 1560 | GCUAUCAAAGAGAUGAUUA | UAAUCAUCUCUUUGAUAGC | 1561 | 289 | Yes | No | No | 45.40 | 42.88 | 1.75 | 6.91 |
| 1562 | CUAUCAAAGAGAUGAUUGA | UCAAUCAUCUCUUUGAUAG | 1563 | 290 | Yes | No | No | 29.69 | 41.07 | 4.51 | 7.30 |
| 1564 | GAGAUGAUUGAGAACUGUA | UACAGUUCUCAAUCAUCUC | 1565 | 298 | Yes | No | No | 63.95 | 51.27 | 7.12 | 6.95 |
| 1584 | UUUAGAUGCAAAAUCCACA | UGUGGAUUUUGCAUCUAAA | 1585 | 315 | Yes | No | No | 57.43 | 40.72 | 2.13 | 9.46 |
| 1598 | CCACAAGUAUUCAAGUGAA | UUCACUUGAAUACUUGUGG | 1599 | 329 | Yes | No | No | 36.95 | 42.89 | 1.04 | 46.13 |
| 1604 | AAGUAUUCAAGUGAUUGUA | UACAAUCACUUGAAUACUU | 1605 | 333 | Yes | No | No | 106.88 | 90.20 | 8.68 | 28.46 |
| 1608 | GUAUUCAAGUGAUUGUUAA | UUAACAAUCACUUGAAUAC | 1609 | 335 | Yes | No | No | 26.99 | 34.32 | 5.14 | 5.86 |
| 1622 | GAGGCCUGAAGUUGAUUCA | UGAAUCAACUUCAGGCCUC | 1623 | 359 | Yes | No | No | 41.86 | 41.02 | 11.50 | 8.02 |
| 1624 | CUGAAGUUGAUUCAGAUCA | UGAUCUGAAUCAACUUCAG | 1625 | 364 | Yes | No | No | 62.65 | 40.21 | 8.63 | 6.58 |
| 1630 | AGUUGAUUCAGAUCCAAGA | UCUUGGAUCUGAAUCAACU | 1631 | 368 | Yes | No | No | 36.04 | 31.21 | 2.32 | 1.66 |
| 1660 | UAUUGUAUGUGAAAGGUUA | UAACCUUUCACAUACAAUA | 1661 | 420 | Yes | No | No | 33.45 | 26.72 | 1.93 | 2.18 |
| 1710 | GUCCUUUGAGGAUUUAGCA | UGCUAAAUCCUCAAAGGAC | 1711 | 456 | Yes | No | No | 54.86 | 47.22 | 12.21 | 6.05 |
| 1720 | UGAGGAUUUAGCCAGUAUA | UAUACUGGCUAAAUCCUCA | 1721 | 462 | Yes | Yes | No | 37.65 | 35.63 | 1.37 | 4.95 |
| 1722 | GAGGAUUUAGCCAGUAUUA | UAAUACUGGCUAAAUCCUC | 1723 | 463 | Yes | Yes | No | 84.59 | 72.97 | 20.93 | 6.80 |
| 1726 | GGAUUUAGCCAGUAUUUCA | UGAAAUACUGGCUAAAUCC | 1727 | 465 | Yes | Yes | No | 46.04 | 37.96 | 13.78 | 9.69 |
| 1728 | GAUUUAGCCAGUAUUUCUA | UAGAAAUACUGGCUAAAUC | 1729 | 466 | Yes | Yes | No | 40.05 | 30.46 | 4.27 | 2.12 |
| 1732 | UAGCCAGUAUUUCUACCUA | UAGGUAGAAAUACUGGCUA | 1733 | 470 | Yes | Yes | No | 34.45 | 36.15 | 1.36 | 19.05 |
| 1734 | AGCCAGUAUUUCUACCUAA | UUAGGUAGAAAUACUGGCU | 1735 | 471 | Yes | Yes | No | 63.67 | 56.73 | 9.01 | 5.58 |
| 1736 | GCCAGUAUUUCUACCUAUA | UAUAGGUAGAAAUACUGGC | 1737 | 472 | Yes | Yes | No | 41.16 | 42.84 | 9.25 | 5.56 |
| 1748 | UCUACCUAUGGCUUUCGAA | UUCGAAAGCCAUAGGUAGA | 1749 | 481 | Yes | No | No | 70.21 | 64.36 | 5.76 | 3.82 |
| 1752 | UACCUAUGGCUUUCGAGGA | UCCUCGAAAGCCAUAGGUA | 1753 | 483 | Yes | No | No | 80.86 | 54.12 | 10.60 | 15.67 |
| 1756 | GCUUUCGAGGUGAGGCUUA | UAAGCCUCACCUCGAAAGC | 1757 | 491 | Yes | No | No | 43.16 | 36.30 | 3.80 | 11.79 |
| 1758 | UUUCGAGGUGAGGCUUUGA | UCAAAGCCUCACCUCGAAA | 1759 | 493 | Yes | No | No | 83.41 | 66.19 | 13.00 | 27.78 |
| 1762 | GCUUUGGCCAGCAUAAGCA | UGCUUAUGCUGGCCAAAGC | 1763 | 505 | Yes | No | No | 106.24 | 93.09 | 21.64 | 22.82 |
| 1764 | AGCAUAAGCCAUGUGGCUA | UAGCCACAUGGCUUAUGCU | 1765 | 514 | Yes | No | No | 106.58 | 96.16 | 45.99 | 59.73 |
| 1772 | UGUGGCUCAUGUUACUAUA | UAUAGUAACAUGAGCCACA | 1773 | 525 | Yes | No | No | 50.08 | 35.84 | 4.25 | 6.11 |
| 1836 | AUACAGAGCAAGUUACUCA | UGAGUAACUUGCUCUGUAU | 1837 | 573 | Yes | No | Yes | 30.97 | 39.43 | 2.52 | 16.42 |
| 1878 | CAAUCAAGGGACCCAGAUA | UAUCUGGGUCCCUUGAUUG | 1879 | 630 | Yes | No | No | 56.87 | 41.98 | 4.06 | 9.71 |
| 1884 | UCACGGUGGAGGACCUUUA | UAAAGGUCCUCCACCGUGA | 1885 | 647 | Yes | No | No | 33.49 | 27.17 | 2.89 | 3.07 |
| 1954 | GACAGUAGCUGAUGUUAGA | UCUAACAUCAGCUACUGUC | 1955 | 795 | Yes | No | No | 32.82 | 32.14 | 2.51 | 5.84 |
| 1960 | AGUAGCUGAUGUUAGGACA | UGUCCUAACAUCAGCUACU | 1961 | 798 | Yes | No | No | 43.70 | 36.61 | 4.16 | 5.59 |
| 1966 | AGCUGAUGUUAGGACACUA | UAGUGUCCUAACAUCAGCU | 1967 | 801 | Yes | No | No | 44.74 | 39.31 | 4.65 | 16.78 |
| 1972 | GUUAGGACACUACCCAAUA | UAUUGGGUAGUGUCCUAAC | 1973 | 808 | Yes | No | No | 44.93 | 42.64 | 11.77 | 8.81 |
| 1974 | UUAGGACACUACCCAAUGA | UCAUUGGGUAGUGUCCUAA | 1975 | 809 | Yes | No | No | 103.18 | 78.48 | 20.86 | 9.68 |
| 1976 | GACACUACCCAAUGCCUCA | UGAGGCAUUGGGUAGUGUC | 1977 | 813 | Yes | No | No | 69.33 | 52.48 | 8.17 | 4.57 |
| 1998 | ACAAUAUUCGCUCCAUCUA | UAGAUGGAGCGAAUAUUGU | 1999 | 839 | Yes | No | No | 49.88 | 39.06 | 2.66 | 3.41 |
| 2008 | UUCGCUCCAUCUUUGGAAA | UUUCCAAAGAUGGAGCGAA | 2009 | 845 | Yes | Yes | Yes | 43.55 | 32.91 | 3.67 | 3.13 |
| 2012 | CGCUCCAUCUUUGGAAAUA | UAUUUCCAAAGAUGGAGCG | 2013 | 847 | Yes | Yes | Yes | 69.62 | 75.70 | 14.97 | 14.19 |
| 2024 | UGGAAAUGCUGUUAGUCGA | UCGACUAACAGCAUUUCCA | 2025 | 858 | Yes | No | Yes | 33.29 | 38.07 | 1.72 | 11.60 |
| 2034 | AUGCUGUUAGUCGAGAACA | UGUUCUCGACUAACAGCAU | 2035 | 863 | Yes | No | Yes | 77.58 | 61.87 | 15.13 | 12.09 |
| 2038 | GCUGUUAGUCGAGAACUGA | UCAGUUCUCGACUAACAGC | 2039 | 865 | Yes | No | Yes | 62.22 | 42.47 | 6.34 | 3.74 |
| 2052 | UCGAGAACUGAUAGAAAUA | UAUUUCUAUCAGUUCUCGA | 2053 | 873 | Yes | No | No | 62.28 | 58.83 | 12.05 | 43.16 |
| 2054 | CGAGAACUGAUAGAAAUUA | UAAUUUCUAUCAGUUCUCG | 2055 | 874 | Yes | No | No | 91.42 | 71.70 | 7.53 | 26.83 |
| 2080 | GUGAGGAUAAAACCCUAGA | UCUAGGGUUUUAUCCUCAC | 2081 | 896 | Yes | Yes | Yes | 47.27 | 45.01 | 5.14 | 4.49 |
| 2086 | AACCCUAGCCUUCAAAAUA | UAUUUUGAAGGCUAGGGUU | 2087 | 906 | Yes | No | No | 43.18 | 47.49 | 4.25 | 28.46 |
| 2114 | UAUCCAAUGCAAACUACUA | UAGUAGUUUGCAUUGGAUA | 2115 | 935 | Yes | No | No | 96.44 | 79.53 | 9.28 | 27.00 |
| 2116 | AUCCAAUGCAAACUACUCA | UGAGUAGUUUGCAUUGGAU | 2117 | 936 | Yes | No | No | 60.35 | 46.08 | 4.80 | 18.11 |
| 2120 | CCAAUGCAAACUACUCAGA | UCUGAGUAGUUUGCAUUGG | 2121 | 938 | Yes | No | No | 94.31 | 73.07 | 30.27 | 33.72 |
| 2122 | CAAUGCAAACUACUCAGUA | UACUGAGUAGUUUGCAUUG | 2123 | 939 | Yes | No | No | 32.31 | 33.92 | 3.24 | 8.37 |
| 2158 | ACUCUUCAUCAACCAUCGA | UCGAUGGUUGAUGAAGAGU | 2159 | 975 | Yes | No | No | 59.69 | 42.41 | 14.57 | 8.92 |
| 2162 | CUUCAUCAACCAUCGUCUA | UAGACGAUGGUUGAUGAAG | 2163 | 978 | Yes | No | No | 41.71 | 34.15 | 2.74 | 1.68 |
| 2176 | CAUCGUCUGGUAGAAUCAA | UUGAUUCUACCAGACGAUG | 2177 | 988 | Yes | No | No | 56.14 | 43.45 | 8.79 | 10.68 |
| 2178 | AUCGUCUGGUAGAAUCAAA | UUUGAUUCUACCAGACGAU | 2179 | 989 | Yes | No | No | 40.77 | 32.37 | 8.28 | 3.44 |
| 2248 | GUACCUCAGUUUAGAAAUA | UAUUUCUAAACUGAGGUAC | 2249 | 1074 | Yes | No | No | 37.30 | 33.90 | 5.96 | 2.15 |
| 2310 | GCACAUCGAGAGCAAGCUA | UAGCUUGCUCUCGAUGUGC | 2311 | 1182 | Yes | No | Yes | 56.04 | 38.24 | 6.45 | 4.05 |
| 2340 | UGUACUUCACCCAGACUUA | UAAGUCUGGGUGAAGUACA | 2341 | 1223 | Yes | No | No | 77.09 | 56.42 | 13.29 | 12.82 |
| 2356 | CUUUGCUACCAGGACUUGA | UCAAGUCCUGGUAGCAAAG | 2357 | 1238 | Yes | No | No | 98.04 | 80.27 | 14.90 | 3.59 |
| 2358 | UUGCUACCAGGACUUGCUA | UAGCAAGUCCUGGUAGCAA | 2359 | 1240 | Yes | No | No | 94.29 | 55.78 | 15.61 | 20.46 |
| 2370 | GGGAGAUGGUUAAAUCCAA | UUGGAUUUAACCAUCUCCC | 2371 | 1268 | Yes | No | No | 38.12 | 26.38 | 1.01 | 3.25 |
| 2432 | CCCACCAGAUGGUUCGUAA | UUACGAACCAUCUGGUGGG | 2433 | 1337 | Yes | No | No | 40.19 | 31.25 | 5.99 | 1.58 |
| 2436 | CCAGAUGGUUCGUACAGAA | UUCUGUACGAACCAUCUGG | 2437 | 1341 | Yes | No | No | 35.85 | 31.67 | 2.51 | 4.02 |
| 2466 | AGCAAACCCCUGUCCAGUA | UACUGGACAGGGGUUUGCU | 2467 | 1399 | Yes | No | No | 62.03 | 44.71 | 31.33 | 10.33 |
| 2496 | AGGGCUAGGCAGCAAGAUA | UAUCUUGCUGCCUAGCCCU | 2497 | 1465 | Yes | No | No | 36.05 | 30.39 | 2.88 | 3.45 |
| 2540 | CCCCAGAAAGAGACAUCGA | UCGAUGUCUCUUUCUGGGG | 2541 | 1602 | Yes | No | No | 43.11 | 33.88 | 4.72 | 2.55 |
| 2570 | GUGGAAGAUGAUUCCCGAA | UUCGGGAAUCAUCUUCCAC | 2571 | 1642 | Yes | No | No | 40.79 | 35.26 | 5.71 | 3.57 |
| 2588 | AUGACUGCAGCUUGUACCA | UGGUACAAGCUGCAGUCAU | 2589 | 1666 | Yes | No | No | 40.79 | 41.66 | 6.77 | 13.47 |
| 2598 | GAGAAGGAUCAUUAACCUA | UAGGUUAAUGAUCCUUCUC | 2599 | 1689 | Yes | No | No | 41.92 | 32.99 | 3.77 | 3.17 |
| 2604 | AAGGAUCAUUAACCUCACA | UGUGAGGUUAAUGAUCCUU | 2605 | 1692 | Yes | No | No | 82.45 | 60.49 | 10.10 | 14.81 |
| 2608 | AUCAUUAACCUCACUAGUA | UACUAGUGAGGUUAAUGAU | 2609 | 1696 | Yes | No | No | 35.09 | 23.03 | 2.87 | 4.80 |
| 2612 | CAUUAACCUCACUAGUGUA | UACACUAGUGAGGUUAAUG | 2613 | 1698 | Yes | No | No | 54.06 | 38.14 | 10.29 | 2.12 |
| 2616 | UUAACCUCACUAGUGUUUA | UAAACACUAGUGAGGUUAA | 2617 | 1700 | Yes | No | No | 39.24 | 29.90 | 2.18 | 4.45 |
| 2618 | AACCUCACUAGUGUUUUGA | UCAAAACACUAGUGAGGUU | 2619 | 1702 | Yes | No | No | 72.65 | 47.22 | 11.56 | 4.86 |
| 2622 | CCUCACUAGUGUUUUGAGA | UCUCAAAACACUAGUGAGG | 2623 | 1704 | Yes | No | No | 52.37 | 36.54 | 3.88 | 6.67 |
| 2628 | CACUAGUGUUUUGAGUCUA | UAGACUCAAAACACUAGUG | 2629 | 1707 | Yes | No | No | 52.90 | 52.38 | 10.72 | 21.32 |
| 2664 | GGAGAUGUUGCAUAACCAA | UUGGUUAUGCAACAUCUCC | 2665 | 1764 | Yes | No | No | 63.04 | 42.75 | 7.90 | 5.27 |
| 2674 | GUGGGCUGUGUGAAUCCUA | UAGGAUUCACACAGCCCAC | 2675 | 1789 | Yes | Yes | Yes | 92.81 | 65.64 | 13.29 | 11.58 |
| 2678 | GGGCUGUGUGAAUCCUCAA | UUGAGGAUUCACACAGCCC | 2679 | 1791 | Yes | Yes | Yes | 98.93 | 53.41 | 25.78 | 15.13 |
| 2720 | ACCACCAAGCUUAGUGAAA | UUUCACUAAGCUUGGUGGU | 2721 | 1852 | Yes | No | No | 50.64 | 36.04 | 5.62 | 6.29 |
| 2744 | ACUGUUCUACCAGAUACUA | UAGUAUCUGGUAGAACAGU | 2745 | 1872 | Yes | No | No | 75.65 | 47.68 | 19.99 | 4.48 |
| 2746 | UGUUCUACCAGAUACUCAA | UUGAGUAUCUGGUAGAACA | 2747 | 1874 | Yes | Yes | No | 37.39 | 30.49 | 2.26 | 4.63 |
| 2748 | GUUCUACCAGAUACUCAUA | UAUGAGUAUCUGGUAGAAC | 2749 | 1875 | Yes | Yes | No | 62.87 | 44.70 | 5.44 | 1.70 |
| 2752 | ACCAGAUACUCAUUUAUGA | UCAUAAAUGAGUAUCUGGU | 2753 | 1880 | Yes | Yes | No | 51.16 | 37.87 | 2.32 | 4.35 |
| 2802 | CCAUGCUUGCCUUAGAUAA | UUAUCUAAGGCAAGCAUGG | 2803 | 1955 | Yes | No | No | 51.62 | 35.17 | 3.88 | 2.12 |
| 2804 | CAUGCUUGCCUUAGAUAGA | UCUAUCUAAGGCAAGCAUG | 2805 | 1956 | Yes | No | No | 73.57 | 32.96 | 20.89 | 5.76 |
| 2806 | GCUUGCCUUAGAUAGUCCA | UGGACUAUCUAAGGCAAGC | 2807 | 1959 | Yes | No | No | 63.25 | 44.04 | 1.71 | 6.37 |
| 2808 | UUGCCUUAGAUAGUCCAGA | UCUGGACUAUCUAAGGCAA | 2809 | 1961 | Yes | No | No | 54.15 | 40.82 | 6.07 | 5.83 |
| 2810 | UGCCUUAGAUAGUCCAGAA | UUCUGGACUAUCUAAGGCA | 2811 | 1962 | Yes | No | No | 48.62 | 37.54 | 3.54 | 10.64 |
| 2836 | ACUUGCUGAAUACAUUGUA | UACAAUGUAUUCAGCAAGU | 2837 | 2016 | Yes | No | No | 44.99 | 38.51 | 6.91 | 5.96 |
| 2840 | GCUGAAUACAUUGUUGAGA | UCUCAACAAUGUAUUCAGC | 2841 | 2020 | Yes | No | No | 97.12 | 72.48 | 23.44 | 20.00 |
| 2870 | GAGAUGCUUGCAGACUAUA | UAUAGUCUGCAAGCAUCUC | 2871 | 2056 | Yes | Yes | No | 61.83 | 61.40 | 6.02 | 14.69 |
| 2882 | CAGACUAUUUCUCUUUGGA | UCCAAAGAGAAAUAGUCUG | 2883 | 2066 | Yes | No | No | 38.09 | 32.29 | 5.14 | 5.55 |
| 2894 | GGGAACCUGAUUGGAUUAA | UUAAUCCAAUCAGGUUCCC | 2895 | 2098 | Yes | Yes | Yes | 88.30 | 69.86 | 4.74 | 13.87 |
| 2898 | UUGGAUUACCCCUUCUGAA | UUCAGAAGGGGUAAUCCAA | 2899 | 2108 | Yes | No | No | 69.26 | 46.23 | 20.07 | 9.56 |
| 2902 | GGAUUACCCCUUCUGAUUA | UAAUCAGAAGGGGUAAUCC | 2903 | 2110 | Yes | No | No | 73.70 | 46.35 | 2.58 | 10.95 |
| 2906 | UACCCCUUCUGAUUGACAA | UUGUCAAUCAGAAGGGGUA | 2907 | 2114 | Yes | No | No | 65.00 | 44.45 | 12.11 | 6.66 |
| 2916 | CUUUGGAGGGACUGCCUAA | UUAGGCAGUCCCUCCAAAG | 2917 | 2144 | Yes | Yes | Yes | 42.51 | 35.02 | 4.80 | 4.51 |
| 2922 | UGGAGGGACUGCCUAUCUA | UAGAUAGGCAGUCCCUCCA | 2923 | 2147 | Yes | Yes | Yes | 39.91 | 42.49 | 12.67 | 12.87 |
| 2924 | GGAGGGACUGCCUAUCUUA | UAAGAUAGGCAGUCCCUCC | 2925 | 2148 | Yes | Yes | Yes | 48.79 | 42.07 | 5.76 | 3.21 |
| 2928 | GGGACUGCCUAUCUUCAUA | UAUGAAGAUAGGCAGUCCC | 2929 | 2151 | Yes | Yes | Yes | 59.78 | 48.89 | 14.17 | 11.75 |
| 2936 | GCCUAUCUUCAUUCUUCGA | UCGAAGAAUGAAGAUAGGC | 2937 | 2157 | Yes | Yes | Yes | 56.69 | 41.63 | 15.43 | 8.74 |
| 2938 | CCUAUCUUCAUUCUUCGAA | UUCGAAGAAUGAAGAUAGG | 2939 | 2158 | Yes | Yes | Yes | 61.36 | 58.55 | 19.37 | 11.66 |
| 2940 | CUAUCUUCAUUCUUCGACA | UGUCGAAGAAUGAAGAUAG | 2941 | 2159 | Yes | Yes | Yes | 36.21 | 34.45 | 4.66 | 6.48 |
| 2944 | AUCUUCAUUCUUCGACUAA | UUAGUCGAAGAAUGAAGAU | 2945 | 2161 | Yes | No | No | 50.60 | 44.76 | 10.87 | 3.93 |
| 2948 | UCGACUAGCCACUGAGGUA | UACCUCAGUGGCUAGUCGA | 2949 | 2172 | Yes | No | No | 48.27 | 35.28 | 3.15 | 3.15 |
| 2966 | GGUGAAUUGGGACGAAGAA | UUCUUCGUCCCAAUUCACC | 2967 | 2187 | Yes | No | No | 54.54 | 42.28 | 6.74 | 0.98 |
| 3020 | CAUCCGGAAGCAGUACAUA | UAUGUACUGCUUCCGGAUG | 3021 | 2253 | Yes | No | No | 43.64 | 31.75 | 2.52 | 3.07 |
| 3022 | UCCGGAAGCAGUACAUAUA | UAUAUGUACUGCUUCCGGA | 3023 | 2255 | Yes | No | No | 47.86 | 33.85 | 6.19 | 3.23 |
| 3024 | CCGGAAGCAGUACAUAUCA | UGAUAUGUACUGCUUCCGG | 3025 | 2256 | Yes | No | No | 42.93 | 31.75 | 4.03 | 4.48 |
| 3026 | CGGAAGCAGUACAUAUCUA | UAGAUAUGUACUGCUUCCG | 3027 | 2257 | Yes | No | No | 41.58 | 34.48 | 1.21 | 8.42 |
| 3028 | GGAAGCAGUACAUAUCUGA | UCAGAUAUGUACUGCUUCC | 3029 | 2258 | Yes | No | No | 78.30 | 43.97 | 20.65 | 12.26 |
| 3064 | GGACUGUGGAACACAUUGA | UCAAUGUGUUCCACAGUCC | 3065 | 2339 | Yes | No | No | 113.80 | 62.77 | 26.58 | 15.98 |
| 3066 | GACUGUGGAACACAUUGUA | UACAAUGUGUUCCACAGUC | 3067 | 2340 | Yes | No | No | 33.65 | 31.90 | 3.61 | 13.34 |
| 3084 | GCCUUGCGCUCACACAUUA | UAAUGUGUGAGCGCAAGGC | 3085 | 2365 | Yes | No | No | 56.61 | 43.91 | 10.56 | 2.89 |
| 3088 | CUUGCGCUCACACAUUCUA | UAGAAUGUGUGAGCGCAAG | 3089 | 2367 | Yes | No | No | 50.33 | 46.74 | 1.45 | 9.10 |
| 3120 | CUAACCUGCCUGAUCUAUA | UAUAGAUCAGGCAGGUUAG | 3121 | 2429 | Yes | No | No | 41.88 | 39.74 | 15.98 | 8.53 |
| 3122 | UAACCUGCCUGAUCUAUAA | UUAUAGAUCAGGCAGGUUA | 3123 | 2430 | Yes | No | No | 44.20 | 43.04 | 4.66 | 4.40 |
| 3124 | CCUGCCUGAUCUAUACAAA | UUUGUAUAGAUCAGGCAGG | 3125 | 2433 | Yes | No | No | 37.49 | 109.90 | 7.18 | 26.42 |
| 3130 | GCCUGAUCUAUACAAAGUA | UACUUUGUAUAGAUCAGGC | 3131 | 2436 | Yes | No | No | 39.21 | 110.46 | 8.85 | 30.44 |
| 3134 | UGAUCUAUACAAAGUCUUA | UAAGACUUUGUAUAGAUCA | 3135 | 2439 | Yes | No | No | 35.25 | 33.81 | 3.13 | 3.06 |
| 3136 | AUCUAUACAAAGUCUUUGA | UCAAAGACUUUGUAUAGAU | 3137 | 2441 | Yes | Yes | No | 61.56 | 44.19 | 12.10 | 7.84 |
| 3148 | AAAGUCUUUGAGAGGUGUA | UACACCUCUCAAAGACUUU | 3149 | 2449 | Yes | No | No | 57.89 | 39.65 | 4.14 | 2.41 |
| 3164 | AGAGGUGUUAAAUAUGGUA | UACCAUAUUUAACACCUCU | 3165 | 2459 | Yes | No | No | 54.13 | 46.33 | 4.74 | 3.48 |
| 3210 | UUCUCUGUAUUCCGAUACA | UGUAUCGGAAUACAGAGAA | 3211 | 2506 | Yes | No | No | 46.41 | 36.80 | 4.59 | 4.07 |
| 3212 | UCUCUGUAUUCCGAUACAA | UUGUAUCGGAAUACAGAGA | 3213 | 2507 | Yes | No | No | 67.04 | 55.75 | 11.62 | 9.15 |
| 3216 | UGUAUUCCGAUACAAAGUA | UACUUUGUAUCGGAAUACA | 3217 | 2511 | Yes | No | No | 46.22 | 37.21 | 3.81 | 7.69 |
| 3248 | UAUACAAAGUGUACCAACA | UGUUGGUACACUUUGUAUA | 3249 | 2546 | Yes | No | No | 71.38 | 48.20 | 9.41 | 3.61 |
| 3272 | GGUAGCACUUAAGACUUAA | UUAAGUCUUAAGUGCUACC | 3273 | 2573 | Yes | No | No | 122.92 | 100.71 | 19.58 | 19.84 |
| 3274 | GCACUUAAGACUUAUACUA | UAGUAUAAGUCUUAAGUGC | 3275 | 2577 | Yes | No | No | 34.74 | 31.11 | 4.11 | 4.59 |
| 3276 | CACUUAAGACUUAUACUUA | UAAGUAUAAGUCUUAAGUG | 3277 | 2578 | Yes | No | No | 41.93 | 95.87 | 9.34 | 19.12 |
| 3278 | CUUAAGACUUAUACUUGCA | UGCAAGUAUAAGUCUUAAG | 3279 | 2580 | Yes | No | No | 52.78 | 47.77 | 7.09 | 23.95 |
| 3288 | GACUUAUACUUGCCUUCUA | UAGAAGGCAAGUAUAAGUC | 3289 | 2585 | Yes | No | No | 41.83 | 38.98 | 3.14 | 19.53 |

### Example 5

[0429] Genomic DNA Extraction and Quantitation of CAG Repeat Length by Small Pool-PCR (sp-PCR) Analyses

[0430] Genomic DNA is purified using standard Proteinase K digestions and extracted using DNAzol (Invitrogen) following the manufacturer's instructions. CAG repeat length is determined by small pool-PCR analyses as previously described (Mario Gomes-Pereira and Darren Monckton, 2017, Front Cell Neuro 11:153). In brief, DNA is digested with HindIII, diluted to a final concentration between 1-6 pg/μl and approximately 10 μg was used in subsequent PCR reactions. Primer flanking Exon 1 of the human HTT are used to amplify the CAG alleles and the PCR product is resolved by electrophoresis. Subsequently, Southern blot hybridization is performed, and the CAG alleles are observed by autoradiography OR visualized with ethidium bromide staining. CAG length can be measured directly by sequencing on a MiSeQ or appropriate machine. The change in CAG repeat number in various treatment groups in comparison with controls is calculated using simple descriptive statistics (e.g. mean±standard deviation).

### Genomic DNA Extraction and Quantitation of CAG Repeat Length by DNA Fragment Analyses

[0431] Genomic DNA is purified using DNAeasy Blood and Tissue Kit (Qiagen) following the manufacturer's instructions. DNA is quantified by Qubit dsDNA assay (ThemoScientific) and CAG repeat length is determined by fragment analysis by Laragen (Culver City, Calif.)

### Example 6. Mouse Studies

### Natural History Studies in HD Mouse Models:

[0432] The HD mouse R6/2 line is transgenic for the 5′ end of the human HD gene (HTT) carrying approximately 120 CAG repeat expansions. HTT is ubiquitously expressed. Transgenic mice exhibit a progressive neurological phenotype that mimics many of the pathological features of HD, including choreiform-like movements, involuntary stereotypic movements, tremor, and epileptic seizures, as well as nonmovement disorder components, including unusual vocalization. They urinate frequently and exhibit loss of body weight and muscle bulk through the course of the disease. Neurologically these mice develop Neuronal Intranuclear Inclusions (NII) which contain both the huntingtin and ubiquitin proteins. Previously unknown, these NII have subsequently been identified in HD patients. The age of onset for development of HD symptoms in R6/2 mice has been reported to occur between 9 and 11 weeks (Mangiarini et al., 1996 Cell 87: 493-506).

[0433] Somatic expansions were reported in R6/2 mice striatum, cortex and liver. Somatic instability increased with higher constitutive length (Larson et al, Neurobiology of Disease 76 (2015) 98-111). A natural history study in R6/2 mice with 120 CAG repeats was performed. Their genotype and length of CAG expansion was determined. R6/2 mice at 4, 8, 12 and 16 weeks of age (4 male and 4 female mice per age group) were sacrificed. Striatum, cerebellum, cortex, liver, kidney, heart, spleen, lung, duodenum, colon, quadricep, CSF and plasma were collected and snap frozen in liquid nitrogen. Genomic DNA was extracted, the length of CAG repeats measured, and the instability index was calculated from striatum, cerebellum, cortex, liver and kidney according to Lee et al. BMC Systems Biology 2010, 4:29). At 12 and 16 weeks of age, the striatum showed a significant increase of somatic expansion as measured by the instability index (****p<0.0001, One-way ANOVA) (FIG. 1). No changes in somatic expansion were observed across all ages in the R6/2 mouse cerebellum (FIG. 2)

[0434] Mouse models recapitulating many of the features of trinucleotide repeat expansion diseases including, HD, FA and DM1, are readily available from commercial venders and academic institutions (Polyglutamine Disorders, Advances in Experimental Medicine and Biology, Vol 1049, 2018: Editors Clevio Nobrega and Lois Pereira de Almeida, Springer). All mouse experiments are conducted in accordance with local IACUC guidelines. Three examples of different diseased mouse models and how they could be used to investigate the usefulness of pharmacological intervention against MLH1 for somatic expansion are included below.

[0435] In Huntington's research, several transgenic and knock-in mouse models were generated to investigate the underlying pathological mechanisms involved in the disease. For example, the R6/2 transgenic mouse contains a transgene of ˜1.9 kb of human HTT containing 144 copies of the CAG repeat (Mangiarini et al., 1996 Cell 87: 493-506) while the HdhQ111 model was generated by replacing the mouse HTT exon 1 with a human exon1 containing 111 copies of the CAG repeat (Wheeler et al., 2000 Hum Mol Genet 9:503-513). Both the R6/2 and HdhQ111 models replicate many of the features of human HD including motor and behavioral dysfunctions, neuronal loss, as well as the expansion of CAG repeats in the striatum (Pouladi et al., 2013, Nature Reviews Neuroscience 14: 708-721; Mangiarini et al., 1997 Nature Genet 15: 197-200; Wheeler et al., Hum Mol Genet 8: 115-122).

[0436] R6/2 mice are genotyped using DNA derived from tail snips at weaning and the CAG repeat size is determined. Mice are randomized into groups (n=12/group) at weaning at 4 wks old and dosed with monthly (week 4 and 8) ICV injection of either PBS (control) or up to a 500 μg dose of oligos targeting MLH1. A series of oligos targeting different regions of MLH1 can be tested to identify the most efficacious oligo sequence in vivo. At 12 weeks of age, mice are euthanized, and tissues extracted for analyses. The list of tissues includes, but not restricted to, striatum, cortex, cerebellum, and liver. Genomic DNA is extracted and the length of CAG repeats measured as described below. CSF and plasma are collected for biomarker analysis. Additional pertinent mouse models of HD can be considered.

[0437] In Friedreich Ataxia, the YG8 FRDA transgenic mouse model is commonly used to understand the pathology (Al-Mandawi et al., 2006 Genomics 88(5)580-590; Bourn et al., 2012 PLOS One 7(10); e47085). This model was generated through the insertion of a human YAC transgenic containing in the background of a null FRDA mouse. The YG8 model demonstrates somatic expansion of the GAA triplet repeat expansion in neuronal tissues with only mild motor defects. YG8 FRDA mice are genotyped using DNA derived from tail snips at weaning and the CAG repeat size is determined using methods. To determine if MLH1 plays a role in somatic expansion of the disease allele, hemizygous YG8 FRDA animals are administered ICV with oligos targeting knockdown of MLH1 identified above.

[0438] Approximately 2 months later, animals are euthanized and tissues collected for molecular analyses. Suitable tissues are heart, quadriceps, dorsal root ganglia (DRG's), cerebellum, kidney, and liver. Genomic DNA is extracted, and the length of CAG repeats measured as described above in Example 5.

[0439] In Myotonic Dystrophy, the DM300-328 transgenic mouse model is suitable for investigating the pathology behind DM1. This mouse model has a large human genomic sequence (˜45 kb) containing over 300 CTG repeats and displays both the somatic expansion and degenerative muscle changes observed in human DM1 (Seznec et al., 2000; Tome et al., 2009 PLOS Genetics 5(5): e1000482; Pandey et al., 2015 J Pharmacol Exp Ther 355:329-340). DM300-328 mice are genotyped using DNA derived from tail snips at weaning and the CAG repeat size is determined. To determine if MLH1 plays a role in somatic expansion of the disease allele in myotonic dystrophy, DM300-328 transgenic animals are administered ASOs targeting knockdown of MLH1 by either subcutaneous injections (sc), intraperitoneal (ip) or intravenous tail injections (iv). Mice are administered ASOs up to 2×/week for maximum 8 weeks of treatment. Animals are euthanized at multiple time points and tissues collected for molecular analyses. Suitable tissues are quadriceps, heart, diaphragm, cortex, cerebellum, sperm, kidney, and liver. Genomic DNA is extracted and the length of CAG repeats measured and compared with parallel controls.

[0440] The HdhQ111 mouse model for Huntington Disease is a heterozygous knock-in line, in which the majority of exon 1 and part of intron 1 on one allele of the huntingtin gene (i.e., HTT or Huntington Disease gene) are replaced with human DNA containing ˜111 CAG repeats. In this example, ASOs to knock down MLH1 activity or levels is administered. After a treatment period, brain tissue from treated or untreated mice is isolated (e.g., striatum tissue) and analyzed using qRT-PCR as previously described to determine RNA levels of MLH1. Huntingtin gene repeat analysis is performed using mouse tissues (e.g., striatum tissue) after a treatment period using a human-specific PCR assay that amplifies the HTT CAG repeat from the knock-in allele but does not amplify the mouse sequence (i.e., the wild type allele). In this protocol, the forward primer is fluorescently labeled (e.g., with 6-FAM as described previously, for example Pinto R M, Dragileva E, Kirby A, et al. Mismatch repair genes MLH1 and MSH3 modify CAG instability in Huntington's disease mice: genome-wide and candidate approaches. PLoS Genet. 2013; 9(10):e1003930.), and products can be resolved using an analyzer with comparison against an internal size standard to generate CAG repeat size distribution traces. Repeat size is determined from the peak with the greatest intensity from a control tissue (e.g., tail tissue in a mouse) and from an affected tissue (e.g., brain striatum tissue or brain cortex tissue). Immunohistochemistry is carried out with polyclonal anti-huntingtin antibody (e.g., EM48) on paraffin-embedded or otherwise prepared sections of brain tissue and can be quantified using a standardized staining index to capture both nuclear staining intensity and number of stained nuclei. A decrease in repeat size in affected tissue indicates that the agent that reduces the level and/or activity of MLH1 is capable of decreasing the repeat which are responsible for the toxic and/or defective gene products in Huntington's disease.

### Other Aspects

[0441] All publications, patents, and patent applications mentioned in this specification are incorporated herein by reference in their entirety to the same extent as if each individual publication, patent, or patent application was specifically and individually indicated to be incorporated by reference in its entirety. Where a term in the present application is found to be defined differently in a document incorporated herein by reference, the definition provided herein is to serve as the definition for the term.

[0442] While the invention has been described in connection with specific aspects thereof, it will be understood that invention is capable of further modifications and this application is intended to cover any variations, uses, or adaptations of the invention following, in general, the principles of the invention and including such departures from the present disclosure that come within known or customary practice within the art to which the invention pertains and can be applied to the essential features hereinbefore set forth, and follows in the scope of the claimed.

[0443] E1. A single-stranded antisense oligonucleotide of 10-30 linked nucleosides in length, wherein the antisense oligonucleotide comprises a region of at least 10 contiguous nucleobases having at least 80% complementarity to an MLH1 gene.

[0444] E2. The antisense oligonucleotide of E2, wherein the antisense oligonucleotide comprises:

[0445] (a) a DNA core sequence comprising linked deoxyribonucleosides;

[0446] (b) a 5′ flanking sequence comprising linked nucleosides; and

[0447] (c) a 3′ flanking sequence comprising linked nucleosides;

[0448] wherein the DNA core comprises a region of at least 10 contiguous nucleobases having at least 80% complementarity to an MLH1 gene and is positioned between the 5′ flanking sequence and the 3′ flanking sequence; wherein the 5′ flanking sequence and the 3′ flanking sequence each comprises at least two linked nucleosides; and wherein at least one nucleoside of each flanking sequence comprises an alternative nucleoside.

[0449] E3. A single-stranded antisense oligonucleotide of 10-30 linked nucleosides in length for inhibiting expression of a human MLH1 gene in a cell, wherein the antisense oligonucleotide comprises a region of at least 10 contiguous nucleobases having at least 80% complementarity to an MLH1 gene.

[0450] E4. The antisense oligonucleotide of E4, wherein the antisense oligonucleotide comprises:

[0451] (a) a DNA core comprising linked deoxyribonucleosides;

[0452] (b) a 5′ flanking sequence comprising linked nucleosides; and

[0453] (c) a 3′ flanking sequence comprising linked nucleosides;

wherein the DNA core comprises a region of at least 10 contiguous nucleobases having at least 80% complementarity to an MLH1 gene and is positioned between the 5′ flanking sequence and the 3′ flanking sequence; wherein the 5′ flanking sequence and the 3′ flanking sequence each comprises at least two linked nucleosides; and wherein at least one nucleoside of each flanking sequence comprises an alternative nucleoside.

[0454] E5. The antisense oligonucleotide of any one of E1-E4, wherein the region of at least 10 nucleobases has at least 90% complementary to an MLH1 gene.

[0455] E6. The antisense oligonucleotide of any one of E1-E5, wherein the region of at least 10 nucleobases has at least 95% complementary to an MLH1 gene.

[0456] E7. The antisense oligonucleotide of any one of E1-E6, wherein the region of at least 10 nucleobases is complementary to an MLH1 gene corresponding to a sequence of reference mRNA NM_000249.3 at one or more of positions 193-258, 289-607, 629-734, 757-836, 865-1125, 1177-1206, 1218-1286, 1324-1408, 1433-1747, 1759-1814, 1852-1901, 1959-2029, 2053-2240, 2250-2356, 2382-2479, 2510-2546, or 2573-2598 of the MLH1 gene.

[0457] E8. The antisense oligonucleotide of any one of E1-E6, wherein the region of at least 10 nucleobases is complementary to an MLH1 gene corresponding to a sequence of reference mRNA NM_000249.3 at one or more of positions 193-251, 289-607, 629-734, 757-836, 865-1125, 1177-1206, 1218-286, 1324-1408, 1433-1747, 1759-1814, 1852-1901, 1959-2029, 2053-2240, 2250-2356, 2382-2479, 2510-2546, or 2573-2598 of the MLH1 gene

[0458] E9. The antisense oligonucleotide of any one of E1-E6, wherein the region of at least 10 nucleobases is complementary to an MLH1 gene corresponding to a sequence of reference mRNA NM_000249.3 at one or more of positions 193-251, 289-607, 629-734, 758-836, 865-1125, 1177-1206, 1218-1286, 1324-1408, 1433-1747, 1759-1814, 1852-1901, 1959-2029, 2053-2240, 2250-2356, 2382-2479, 2510-2546, or 2573-2598 of the MLH1 gene.

[0459] E10. The antisense oligonucleotide of any one of E1-E6, wherein the region of at least 10 nucleobases is complementary to an MLH1 gene corresponding to a sequence of reference mRNA NM_000249.3 at one or more of positions 312-391, 410-508, 522-607, 629-726, 759-1125, 1177-1206, 1221-1286, 1324-1407, 1433-1747, 1764-1814, 1854-1901, 1959-2029, 2053-2113, 2184-2240, 2251-2283, 2303-2351, 2384-2479, or 2510-2546 of the MLH1 gene.

[0460] E11. The antisense oligonucleotide of any one of E1-E6, wherein the region of at least 10 nucleobases is complementary to an MLH1 gene corresponding to a sequence of reference mRNA NM_000249.3 at one or more of positions 575-602, 662-724, 805-830, 891-960, 1002-1027, 1056-1081, 1100-1125, 1342-1384, 1443-1498, 1513-1561, 1600-1625, 1652-1747, 1876-1901, 2001-2026, or 2430-2459 of the MLH1 gene.

[0461] E12. The antisense oligonucleotide of any one of E1-E6, wherein the region of at least 10 nucleobases is complementary to an MLH1 gene corresponding to a sequence of reference mRNA NM_000249.3 at one or more of positions 307-332, 458-500, 571-602, 758-787, 865-890, 892-917, 1045-1084, 1624-1649, 1786-1813, 1871-1901, 2053-2081, 2086-2114, or 2149-2176 of the MLH1 gene.

[0462] E13. The antisense oligonucleotide of any one of E1-E6, wherein the region of at least 10 nucleobases is complementary to an MLH1 gene corresponding to a sequence of reference mRNA NM_000249.3 at one or more of positions 575-602, 1056-1081, or 1876-1901 of the MLH1 gene.

[0463] E14. The antisense oligonucleotide of any one of E1-E6, wherein the antisense oligonucleotide comprises the nucleobase sequence of any one of SEQ ID NOs: 6-1393.

[0464] E15. The antisense oligonucleotide of any one of E1-E6, wherein the antisense oligonucleotide comprises the nucleobase sequence of any one of SEQ ID NOs: 81-84, 86-87, 90, 99-101, 106-107, 111, 113-114, 117, 122-126, 129-131, 137-138, 140, 144, 146-160, 172, 188-191, 211, 215-220, 222-226, 229, 231-239, 242-249, 270-271, 274-279, 286-293, 295-298, 310-320, 322-328, 332-335, 337, 345, 383-388, 397-402, 405-413, 415-421, 458, 473-474, 476-478, 482-487, 490-491, 493-494, 497-501, 522-526, 528-530, 542, 545-549, 551-560, 563-565, 585-586, 596-598, 600-610, 613, 619-622, 631-634, 636-637, 639-643, 645-646, 649-651, 655, 699, 701-709, 714-715, 729-731, 733-741, 744, 749, 752-754, 757, 765-766, 768-769, 788-791, 819, 827-835, 840-842, 845, 847, 850, 852-853, 857, 859, 861, 866-872, 877-882, 884-887, 889-890, 893-894, 901, 923-931, 936-939, 975, 977, 981-986, 1019, 1023-1032, 1034, 1036-1041, 1083-1087, 1089, 1101, 1104-1105, 1107, 1109-1112, 1118-1123, 1131-1134, 1136, 1138-1139, 1140-1144, 1151-1152, 1161-1163, 1187-1192, 1194-1195, 1197, 1199-1201, 1204, 1207, 1209, 1214-1216, 1218, 1220-1223, 1239-1241, 1244, 1247, 1257-1259, 1262-1270, 1273-1275, 1277-1278, 1314-1315, or 1343.

[0465] E16. The antisense oligonucleotide of any one of E1-E6, wherein the antisense oligonucleotide comprises the nucleobase sequence of any one of SEQ ID NOs: 81-84, 86-87, 99-101, 106, 113-114, 122-126, 129-131, 137-138, 140, 144, 146-159, 172, 188-191, 211, 215-217, 219, 223-226, 229, 232-239, 242-249, 270-271, 274-279, 286-293, 295-298, 310-320, 322-328, 332-335, 337, 345, 384-388, 397-402, 405-421, 458, 473-474, 476-478, 482-487, 490-491, 493-494, 497-501, 522-526, 528-530, 542, 545-549, 551-560, 563-565, 585-586, 596-610, 613, 619-622, 631-634, 636-637, 639-643, 645-646, 649-651, 655, 699-709, 714-715, 729-731, 733-741, 744, 749, 752-754, 757, 765-766, 768-769, 788-791, 819, 827-835, 840-842, 845, 847, 850, 852-853, 857, 859, 861, 866-872, 877-882, 884-887, 889-890, 893-894, 901, 923-931, 936-939, 975, 977, 981-986, 1019, 1023-1032, 1034, 1036-1041, 1083-1087, 1089, 1101, 1104-1105, 1107, 1109-1112, 1118-1123, 1131-1134, 1136, 1138-1144, 1151-1152, 1161-1163, 1187-1191, 1194-1195, 1197, 1199-1201, 1204, 1207, 1209, 1214-1216, 1218, 1220-1223, 1239-1241, 1244, 1247, 1257-1259, 1262-1270, 1273-1275, 1277-1278, 1314-1315, or 1343.

[0466] E17. The antisense oligonucleotide of any one of E1-E6, wherein the antisense oligonucleotide comprises the nucleobase sequence of any one of SEQ ID NOs: 81-87, 99-101, 106, 113-114, 122-126, 129-131, 137-138, 140, 144, 146, 147, 148-151, 153-159, 172, 188-191, 211215-217, 219, 223-226, 229, 232-239, 242-245, 248-249, 270-271274-276, 278-279, 286-293, 295-298, 310-320, 322-338, 332-335, 337, 345, 384-386, 387-388, 397-402, 405-413, 415-421, 458, 473-474, 476-478, 482-487, 490-491, 493-494, 497-501, 522-526, 528-530, 542, 545-549, 551-560, 563-565, 585-586, 596-598, 600-610, 613, 619-622, 631-634, 636-637, 639-643, 645-646, 649-651, 655, 699, 701-709, 714-715, 729-731, 733-741, 744, 749, 752-754, 757, 765-766, 768-769, 788, 790-791, 819, 827-835, 840-842, 845, 847, 850, 852-853, 857, 859, 861, 866-872, 877-882, 884-887, 889-890, 893-894, 901, 923-931, 936-939, 975, 977, 981-986, 1019, 1023-1032, 1034, 1036-1041, 1083-1087, 1089, 1101, 1104-1105, 1107, 1109-1112, 1118-1123, 1131-1134, 1136, 1138-1144, 1151-1152, 1161-1163, 1187-1191, 1194-1195, 1197, 1199, 1200-1201, 1204, 1207, 1209, 1214-1216, 1218, 1220-1223, 1239-1241, 1244, 1247, 1257-1259, 1262-1270, 1273-1275, 1277-1278, 1314-1315, or 1343.

[0467] E18. The antisense oligonucleotide of any one of E1-E6, wherein the antisense oligonucleotide comprises the nucleobase sequence of any one of SEQ ID NOs: 122, 123, 125-126, 129-130, 131, 137, 146-147, 153-156, 158, 188-191, 211, 216, 223, 226, 235, 237, 245, 248, 270-271, 276, 278-279, 286, 289-293, 297-298, 310, 312-320, 323-328, 332, 334-335, 337, 385-386, 397-402, 407, 410-412, 415-417, 419-420, 476, 478, 482-487, 490-491, 493-494, 497-501, 522-523, 525-526, 528-530, 546-548, 557, 563-565, 586, 603, 605-610, 613, 619-622, 631-632, 634, 639-641, 645-646, 650-651, 655, 699, 701, 704-709, 714, 729-731, 733-734, 736-740, 744, 749, 752-754, 757, 765-766, 768-769, 788, 790-791, 819, 827-835, 840-842, 847, 850, 859, 861, 866-872, 877-882, 884-887, 889-890, 893-894, 901, 928-931, 936-939, 977, 981-986, 1019, 1024-1026, 1034, 1036-1041, 1083-1085, 1087, 1111, 1132-1134, 1136, 1138-1140, 1142, 1161-1163, 1188-1190, 1194-1195, 1207, 1218, 1241, 1244, 1247, 1257-1259, 1262-1269, 1277-1278, or 1314-1315.

[0468] E19. The antisense oligonucleotide of any one of E1-E6, wherein the antisense oligonucleotide comprises the nucleobase sequence of any one of SEQ ID NOs: 291-293, 313, 316-317, 325-326, 334-335, 415, 483, 485-486, 499-500, 523, 525, 564, 607, 622, 704-705, 707-709, 739, 752, 768-769, 788, 827, 861, 871-872, 877-879, 882, 885, 886, 901, 986, 1038, 1263, or 1265-1267.

[0469] E20. The antisense oligonucleotide of any one of E1-E6, wherein the antisense oligonucleotide comprises the nucleobase sequence of any one of SEQ ID NOs: 117, 215-226, 229-232, 287-293, 384-385, 387-388, 458, 484, 596-610, 850, 936-938, 981-986, 1083-1086, 1109-1112, or 1121-1123.

[0470] E21. The antisense oligonucleotide of any one of E1-E6, wherein the nucleobase sequence of the antisense oligonucleotide consists of any one of SEQ ID NOs: 6-1393.

[0471] E22. The antisense oligonucleotide of any one of E1-E6, wherein the antisense oligonucleotide consists of the nucleobase sequence of any one of SEQ ID NOs: 81-87, 90, 99-101, 106-107, 111, 113-114, 117, 122-126, 129-131, 137-138, 140, 144, 146-160, 172, 188-191, 211, 215-220, 22-226, 229, 231-239, 242-249, 270-271, 274-279, 286-293, 295-297, 298, 310-320, 322-328, 332-335, 337, 345, 383-388, 397-402, 405-413, 415-421, 458, 473-474, 476-478, 482-487, 490-491, 493-494, 497-501, 522-526, 528-530, 542, 545-549, 551-560, 563-565, 585-586, 596-598, 600-610, 613, 619-622, 631-634, 636-637, 639-643, 645-646, 649-651, 655, 699, 701-709, 714-715, 729-731, 733-741, 744, 749, 752-754, 757, 765-766, 768-769, 788, 790-791, 819, 827-835, 840-842, 845, 847, 850, 852-853, 857, 859, 861, 866-872, 877-882, 884-887, 889-890, 893-894, 901, 923-931, 936-939, 975, 977, 981-986, 1019, 1023-1032, 1034, 1036-1041, 1083-1087, 1089, 1101, 1104-1105, 1107, 1109-1112, 118-1123, 1131-1134, 1136, 1138-1144, 1151-1152, 1161-1163, 1187-1192, 1194-1195, 1197, 1199-1201, 1204, 1207, 1209, 1214-1216, 1218, 1220-1222, 1223, 1239-1241, 1244, 1247, 1257-1259, 1262-1270, 1273-1275, 1277-1278, 1314-1315, or 1343.

[0472] E23. The antisense oligonucleotide of any one of E1-E6, wherein the antisense oligonucleotide consists of the nucleobase sequence of any one of SEQ ID NOs: 81-84, 86-87, 99-101, 106, 113-114, 122-126, 129-131, 137-138, 140, 144, 146-159, 172, 188-191, 211, 215-217, 219, 223-226, 229, 232-239, 242-249, 270-271, 274-279, 286-293, 295-298, 310-320, 322-328, 332-335, 337, 345, 384-388, 397-402, 405-413, 415-421, 458, 473-474, 476-478, 482-487, 490-491, 493-494, 497-501, 522-526, 528-530, 542, 545-549, 551-560, 563-565, 585-586, 596-598, 600-610, 613, 619-622, 631-634, 636-637, 639-643, 645-646, 649-651, 655, 699, 701-709, 714-715, 729-731, 733-741, 744, 749, 752-754, 757, 765-766, 768-769, 788, 790-791, 819, 827-835, 840-842, 845, 847, 850, 852-853, 857, 859, 861, 866-872, 877-882, 884-887, 889-890, 893-894, 901, 923-931, 936-939, 975, 977, 981-986, 1019, 1023-1032, 1034, 1036-1041, 1083-1087, 1089, 1101, 1104-1105, 1107, 1109-1112, 1118-1123, 1131-1134, 1136, 1138-1144, 1151-1152, 1161-1163, 1187-1191, 1194-1195, 1197, 1199-1201, 1204, 1207, 1209, 1214-1216, 1218, 1220-1223, 1239-1241, 1244, 1247, 1257-1259, 1262-1270, 1273-1275, 1277-1278, 1314-1315, or 1343.

[0473] E24. The antisense oligonucleotide of any one of E1-E6, wherein the antisense oligonucleotide consists of the nucleobase sequence of any one of SEQ ID NOs: 81-84, 86-87, 99-101, 106, 113-114, 122-126, 129-131, 137-138, 140, 144, 146-151, 153-159, 172, 188-191, 211, 215-217, 219223-226, 229, 232-239, 242-245, 248-249, 270-271, 274-276, 278-279, 286-293, 295-298, 310-320, 322-328, 332-335, 337, 345, 384-388, 397-402, 405-413, 415-421, 458, 473-474, 476-478, 482-487, 490-491, 493-494, 497-501, 522-525, 526, 528-530, 542, 545-549, 551-560, 563-565, 585-586, 596-598, 600-610, 613, 619-622, 631-634, 636-637, 639-643, 645-646, 649-651, 655, 699, 701-709, 714-715, 729-731, 733-741, 744, 749, 752-754, 757, 765-766, 768-769, 788, 790-791, 819, 827-835, 840-842, 845, 847, 850, 852-853, 857, 859, 861, 866-872, 877-882, 884-887, 889-890, 893-894, 901, 923-931, 936-939, 975, 977, 981-986, 1019, 1023-1032, 1034, 1036-1041, 1083-1087, 1089, 1101, 1104-1105, 1107, 1109-1112, 1118-1123, 1131-1134, 1136, 1138-1144, 1151-1152, 1161-1163, 1187-1191, 1194-1195, 1197, 1199-1201, 1204, 1207, 1209, 1214-1216, 1218, 1220-1223, 1239-1241, 1244, 1247, 1257-1259, 1262-1270, 1273-1275, 1277-1278, 1314-1315, or 1343.

[0474] E25. The antisense oligonucleotide of any one of E1-E6, wherein the antisense oligonucleotide consists of the nucleobase sequence of any one of SEQ ID NOs: 122-123, 125-126, 129-131, 137, 146-147, 153-156, 158, 188-191, 211, 216, 223, 226, 235, 237, 245, 248, 270-271, 276, 278-279, 286, 289-293, 297-298, 310, 312-320, 323-328, 332, 334-335, 337, 385-386, 397-402, 407, 410-412, 415-417, 419-420, 476, 478, 482-487, 490-491, 493-494, 497-501, 522-523, 525-526, 528-530, 546-548, 557, 563-565, 586, 603, 605-610, 613, 619-622, 631-632, 634, 639-641, 645-646, 650-651, 655, 699, 701, 704-709, 714, 729-731, 733-734, 736-740, 744, 749, 752-754, 757, 765-766, 768-769, 788, 790-791, 819, 827-835, 840-842, 847, 850, 859, 861, 866-867, 868-872, 877-882, 884-887, 889-890, 893-894, 901, 928-931, 936-939, 977, 981-986, 1019, 1024-1026, 1034, 1036-1041, 1083-1085, 1087, 1111, 1132-1134, 1136, 1138-1140, 1142, 1161-1163, 1188-1190, 1194-1195, 1207, 1218, 1241, 1244, 1247, 1257-1259, 1262-1269, 1277-1278, or 1314-1315.

[0475] E26. The antisense oligonucleotide of any one of E1-E6, wherein the antisense oligonucleotide consists of the nucleobase sequence of any one of SEQ ID NOs: 291-293, 313, 316-317, 325-326, 334-335, 415, 483, 485-486, 499-500, 523, 525, 564, 607, 622, 704-705, 707-709, 739, 752, 768-769, 788, 827, 861, 871-872, 877-879, 882, 885, 886, 901, 986, 1038, 1263, or 1265-1267.

[0476] E27. The antisense oligonucleotide of any one of E1-E6, wherein the antisense oligonucleotide consists of the nucleobase sequence of any one of SEQ ID NOs: 117, 215-226, 229-232, 287-293, 384-385, 387-388, 458-484, 596-610, 850, 936-938, 981-986, 1083-1086, 1109-1112 or 1121-1123.

[0477] E28. The antisense oligonucleotide of any one of E1-E27, wherein the antisense oligonucleotide exhibits at least 50% mRNA inhibition at a 20 nM oligonucleotide concentration when determined using a cell assay when compared with a control cell.

[0478] E29. The antisense oligonucleotide of any one of E1-E27, wherein the antisense oligonucleotide exhibits at least 60% mRNA inhibition at a 20 nM antisense oligonucleotide concentration when determined using a cell assay when compared with a control cell.

[0479] E30. The antisense oligonucleotide of any one of E1-E27, wherein the antisense oligonucleotide exhibits at least 70% mRNA inhibition at a 20 nM antisense oligonucleotide concentration when determined using a cell assay when compared with a control cell.

[0480] E31. The antisense oligonucleotide of any one of E1-E27, wherein the antisense oligonucleotide exhibits at least 85% mRNA inhibition at a 20 nM antisense oligonucleotide concentration when determined using a cell assay when compared with a control cell.

[0481] E32. The antisense oligonucleotide of any one of E1-E27, wherein the antisense oligonucleotide exhibits at least 50% mRNA inhibition at a 20 nM antisense oligonucleotide concentration when determined using a cell assay when compared with a control cell.

[0482] E33. The antisense oligonucleotide of any one of E1-E27, wherein the antisense oligonucleotide exhibits at least 60% mRNA inhibition at a 20 nM antisense oligonucleotide concentration when determined using a cell assay when compared with a control cell.

[0483] E34. The antisense oligonucleotide of any one of E1-E27, wherein the antisense oligonucleotide exhibits at least 70% mRNA inhibition at a 20 nM antisense oligonucleotide concentration when determined using a cell assay when compared with a control cell.

[0484] E35. The antisense oligonucleotide of any one of E1-E27, wherein the antisense oligonucleotide exhibits at least 85% mRNA inhibition at a 20 nM antisense oligonucleotide concentration when determined using a cell assay when compared with a control cell.

[0485] E36. The antisense oligonucleotide of any one of E1-E35, wherein the antisense oligonucleotide comprises at least one alternative internucleoside linkage.

[0486] E37. The antisense oligonucleotide of E36, wherein the at least one alternative internucleoside linkage is a phosphorothioate internucleoside linkage.

[0487] E38. The antisense oligonucleotide of E36, wherein the at least one alternative internucleoside linkage is a 2′-alkoxy internucleoside linkage.

[0488] E39. The antisense oligonucleotide of E36, wherein the at least one alternative internucleoside linkage is an alkyl phosphate internucleoside linkage.

[0489] E40. The antisense oligonucleotide of any one of E1-E39, wherein the antisense oligonucleotide comprises at least one alternative nucleobase.

[0490] E41. The antisense oligonucleotide of E40, wherein the alternative nucleobase is 5′-methylcytosine, pseudouridine, or 5-methoxyuridine.

[0491] E42. The antisense oligonucleotide of any one of E1-E41, wherein the antisense oligonucleotide comprises at least one alternative sugar moiety.

[0492] E43. The antisense oligonucleotide of E42, wherein the alternative sugar moiety is 2′-OMe or a bicyclic nucleic acid.

[0493] E44. The antisense oligonucleotide of any one of E1-E43, wherein the antisense oligonucleotide further comprises a ligand conjugated to the 5′ end or the 3′ end of the antisense oligonucleotide through a monovalent or branched bivalent or trivalent linker.

[0494] E45. The antisense oligonucleotide of any one of E1-E44, wherein the antisense oligonucleotide comprises a region complementary to at least 17 contiguous nucleotides of a MLH1 gene.

[0495] E46. The antisense oligonucleotide of E45, wherein the antisense oligonucleotide comprises a region complementary to at least 19 contiguous nucleotides of a MLH1 gene.

[0496] E47. The antisense oligonucleotide of any one of E1-E44, wherein the antisense oligonucleotide comprises a region complementary to 19 to 23 contiguous nucleotides of a MLH1 gene.

[0497] E48. The antisense oligonucleotide of any one of E1-E44, wherein the antisense oligonucleotide comprises a region complementary to 19 contiguous nucleotides of a MLH1 gene.

[0498] E49. The antisense oligonucleotide of any one of E1-E44, wherein the antisense oligonucleotide comprises a region complementary to 20 contiguous nucleotides of a MLH1 gene.

[0499] E50. The antisense oligonucleotide of any one of E1-E44, wherein the antisense oligonucleotide is from about 15 to 25 nucleosides in length.

[0500] E51. The antisense oligonucleotide of any one of E1-E44, wherein the antisense oligonucleotide is 20 nucleosides in length.

[0501] E52. A pharmaceutical composition comprising one or more of the antisense oligonucleotides of any one of E1-E51 and a pharmaceutically acceptable carrier or excipient.

[0502] E53. A composition comprising one or more of the antisense oligonucleotides of any one of E1-E51 and a lipid nanoparticle, a polyplex nanoparticle, a lipoplex nanoparticle, ora liposome.

[0503] E54. A method of inhibiting transcription of MLH1 in a cell, the method comprising contacting the cell with one or more of the antisense oligonucleotides of any one of E1-E51, the pharmaceutical composition of E52, or the composition of E53 for a time sufficient to obtain degradation of an mRNA transcript of a MLH1 gene, inhibits expression of the MLH1 gene in the cell.

[0504] E55. A method of treating, preventing, or delaying the progression a trinucleotide repeat expansion disorder in a subject in need thereof, the method comprising administering to the subject one or more of the antisense oligonucleotides of any one of E1-E51, the pharmaceutical composition of E52, or the composition of E53.

[0505] E56. A method of reducing the level and/or activity of MLH1 in a cell of a subject identified as having a trinucleotide repeat expansion disorder, the method comprising contacting the cell with one or more of the antisense oligonucleotides of any one of E1-E51, the pharmaceutical composition of E52, or the composition of E53.

[0506] E57. A method for inhibiting expression of an MLH1 gene in a cell comprising contacting the cell with one or more of the antisense oligonucleotides of any one of E1-E51, the pharmaceutical composition of E52, or the composition of E53 and maintaining the cell for a time sufficient to obtain degradation of a mRNA transcript of an MLH1 gene, thereby inhibiting expression of the MLH1 gene in the cell.

[0507] E58. A method of decreasing trinucleotide repeat expansion in a cell, the method comprising contacting the cell with one or more of the antisense oligonucleotides of any one of E1-E51, the pharmaceutical composition of E52, or the composition of E53.

[0508] E59. The method of E57 or E58, wherein the cell is in a subject.

[0509] E60. The method of any one of E55, E56, and E59, wherein the subject is a human.

[0510] E61. The method of any one of E55-E59, wherein the cell is a cell of the central nervous system or a muscle cell.

[0511] E62. The method of any one of E54, E55, and E59-E61, wherein the subject is identified as having a trinucleotide repeat expansion disorder.

[0512] E63. The method of any one of E55, E56, and E58-E62, wherein the trinucleotide repeat expansion disorder is a polyglutamine disease.

[0513] E64. The method of E63, wherein the polyglutamine disease is selected from the group consisting of dentatorubropallidoluysian atrophy, Huntington's disease, spinal and bulbar muscular atrophy, spinocerebellar ataxia type 1, spinocerebellar ataxia type 2, spinocerebellar ataxia type 3, spinocerebellar ataxia type 6, spinocerebellar ataxia type 7, spinocerebellar ataxia type 17, and Huntington's disease-like 2.

[0514] E65. The method of any one of E55-E62, wherein the trinucleotide repeat expansion disorder is a non-polyglutamine disease.

[0515] E66. The method of E65, wherein the non-polyglutamine disease is selected from the group consisting of fragile X syndrome, fragile X-associated tremor/ataxia syndrome, fragile XE mental retardation, Friedreich's ataxia, myotonic dystrophy type 1, spinocerebellar ataxia type 8, spinocerebellar ataxia type 12, oculopharyngeal muscular dystrophy, Fragile X-associated premature ovarian failure, FRA2A syndrome, FRA7A syndrome, and early infantile epileptic encephalopathy.

[0516] E67. One or more antisense oligonucleotides of any one of E1-E51, the pharmaceutical composition of E52, or the composition of E53 for use in the prevention or treatment of a trinucleotide repeat expansion disorder.

[0517] E68. The antisense oligonucleotide, pharmaceutical composition, or composition for the use of E67, wherein the trinucleotide repeat expansion disorder is selected from the group consisting of dentatorubropallidoluysian atrophy, Huntington's disease, spinal and bulbar muscular atrophy, spinocerebellar ataxia type 1, spinocerebellar ataxia type 2, spinocerebellar ataxia type 3, spinocerebellar ataxia type 6, spinocerebellar ataxia type 7, spinocerebellar ataxia type 17, Huntington's disease-like 2, fragile X syndrome, fragile X-associated tremor/ataxia syndrome, fragile XE mental retardation, Friedreich's ataxia, myotonic dystrophy type 1, spinocerebellar ataxia type 8, spinocerebellar ataxia type 12, oculopharyngeal muscular dystrophy, Fragile X-associated premature ovarian failure, FRA2A syndrome, FRA7A syndrome, and early infantile epileptic encephalopathy.

[0518] E69. The antisense oligonucleotide, pharmaceutical composition, or composition for the use of E67 or E68, wherein the trinucleotide repeat expansion disorder is Huntington's disease.

[0519] E70. The antisense oligonucleotide, pharmaceutical composition, or composition for the use of E67 or E68, wherein the trinucleotide repeat expansion disorder is Friedreich's ataxia.

[0520] E71. The antisense oligonucleotide, pharmaceutical composition, or composition for the use of E67 or E68, wherein the trinucleotide repeat expansion disorder is myotonic dystrophy type 1.

[0521] E72. The antisense oligonucleotide, pharmaceutical composition, or composition for the use of any of E67-E71, wherein the antisense oligonucleotide, pharmaceutical composition, or composition is administered intrathecally.

[0522] E73. The antisense oligonucleotide, pharmaceutical composition, or composition for the use of any of E67-E71, wherein the antisense oligonucleotide, pharmaceutical composition, or composition is administered intraventricularly.

[0523] E74. The antisense oligonucleotide, pharmaceutical composition, or composition for use of any of E67-E71, wherein the antisense oligonucleotide, pharmaceutical composition, or composition is administered intramuscularly.

[0524] E75. A method of treating, preventing, or delaying the progression a disorder in a subject in need thereof wherein the subject is suffering from trinucleotide repeat expansion disorder, comprising administering to said subject one or more of the antisense oligonucleotides of any one of E1-E51, the pharmaceutical composition of E52, or the composition of E53.

[0525] E76. The method of E75, further comprising administering an additional therapeutic agent.

[0526] E77. The method of E76, wherein the additional therapeutic agent is an oligonucleotide that hybridizes to an mRNA encoding the Huntingtin gene.

[0527] E78. A method of preventing or delaying the progression of a trinucleotide repeat expansion disorder in a subject, the method comprising administering to the subject one or more of the antisense oligonucleotides of any one of E1-E51, the pharmaceutical composition of E52, or the composition of E53 in an amount effective to delay progression of a trinucleotide repeat expansion disorder of the subject.

[0528] E79. The method of E78, wherein the trinucleotide repeat expansion disorder is selected from the group consisting of dentatorubropallidoluysian atrophy, Huntington's disease, spinal and bulbar muscular atrophy, spinocerebellar ataxia type 1, spinocerebellar ataxia type 2, spinocerebellar ataxia type 3, spinocerebellar ataxia type 6, spinocerebellar ataxia type 7, spinocerebellar ataxia type 17, Huntington's disease-like 2, fragile X syndrome, fragile X-associated tremor/ataxia syndrome, fragile XE mental retardation, Friedreich's ataxia, myotonic dystrophy type 1, spinocerebellar ataxia type 8, spinocerebellar ataxia type 12, oculopharyngeal muscular dystrophy, Fragile X-associated premature ovarian failure, FRA2A syndrome, FRA7A syndrome, and early infantile epileptic encephalopathy.

[0529] E80. The method of E78 or E79, wherein the trinucleotide repeat expansion disorder is Huntington's disease.

[0530] E81. The method of E78 or E79, wherein the trinucleotide repeat expansion disorder is Friedrich's ataxia.

[0531] E82. The method of E78 or E79, wherein the trinucleotide repeat expansion disorder is myotonic Dystrophy type 1.

[0532] E83. The method of E78 or E79, further comprising administering an additional therapeutic agent.

[0533] E84. The method of E83, wherein the additional therapeutic agent is an oligonucleotide that hybridizes to an mRNA encoding the Huntington gene.

[0534] E85. The method of any of E78-E84, wherein progression of the trinucleotide repeat expansion disorder is delayed by at least 120 days, for example, at least 6 months, at least 12 months, at least 2 years, at least 3 years, at least 4 years, at least 5 years, at least 10 years or more, when compared with a predicted progression.

[0535] E86. One or more antisense oligonucleotides of any one of E1-E51, the pharmaceutical composition of E52, or the composition of E53, for use in preventing or delaying progression of a trinucleotide repeat expansion disorder in a subject.

[0536] E87. The antisense oligonucleotide, pharmaceutical composition, or composition for the use of E86, wherein the trinucleotide repeat expansion disorder is selected from the group consisting of dentatorubropallidoluysian atrophy, Huntington's disease, spinal and bulbar muscular atrophy, spinocerebellar ataxia type 1, spinocerebellar ataxia type 2, spinocerebellar ataxia type 3, spinocerebellar ataxia type 6, spinocerebellar ataxia type 7, spinocerebellar ataxia type 17, Huntington's disease-like 2, fragile X syndrome, fragile X-associated tremor/ataxia syndrome, fragile XE mental retardation, Friedreich's ataxia, myotonic dystrophy type 1, spinocerebellar ataxia type 8, spinocerebellar ataxia type 12, oculopharyngeal muscular dystrophy, Fragile X-associated premature ovarian failure, FRA2A syndrome, FRA7A syndrome, and early infantile epileptic encephalopathy.

[0537] E88. The antisense oligonucleotide, pharmaceutical composition, or composition for the use of E86 or E87, wherein the trinucleotide repeat expansion disorder is Huntington's disease.

[0538] E89. The antisense oligonucleotide, pharmaceutical composition, or composition for the use of E86 or E87, wherein the trinucleotide repeat expansion disorder is Friedrich's ataxia.

[0539] E90. The antisense oligonucleotide, pharmaceutical composition, or composition for the use of E86 or E87, wherein the trinucleotide repeat expansion disorder is Myotonic dystrophy type 1.

[0540] E91. The antisense oligonucleotide, pharmaceutical composition, or composition for the use of any one of E86-E90, wherein progression of the trinucleotide repeat expansion disorder is delayed by at least 120 days, for example, at least 6 months, at least 12 months, at least 2 years, at least 3 years, at least 4 years, at least 5 years, at least 10 years or more, when compared with a predicted progression.

[0541] E92. A double-stranded ribonucleic acid (dsRNA), wherein the dsRNA comprises a sense strand and an antisense strand, wherein the antisense strand is complementary to at least 15 contiguous nucleobases of an MLH1 gene, and wherein the dsRNA comprises a duplex structure of between 15 and 30 linked nucleosides in length.

[0542] E93. A dsRNA for reducing expression of MLH1 in a cell, wherein the dsRNA comprises a sense strand and an antisense strand, wherein the antisense strand is complementary to at least 15 contiguous nucleobases of an MLH1 gene, and wherein the dsRNA comprises a duplex structure of between 15 and 30 linked nucleosides in length.

[0543] E94. The dsRNA of E92 or E93 comprising a duplex structure of between 19 and 23 linked nucleosides in length.

[0544] E95. The dsRNA of any one of E92-E94, further comprising a loop region joining the sense strand and antisense strand, wherein the loop region is characterized by a lack of base pairing between nucleobases within the loop region.

[0545] E96. The dsRNA of any one of E92-E95, wherein the region the sense or antisense strand is complementary to is at least 15 contiguous nucleotides of an MLH1 gene corresponding to reference mRNA NM_000249.3 at one or more of positions 153-176, 267-388, 417-545, 792-995, 1639-1727, 1849-1900, 2105-2207, 2337-2387, 2426-2479 and 2508-2600 of the MLH1 gene.

[0546] E97. The dsRNA of any one of E92-E95, wherein the region the sense or antisense strand is complementary to is at least 15 contiguous nucleotides of an MLH1 gene corresponding to reference mRNA NM_000249.3 at one or more of positions 326-388, 459-511, 805-878, 903-926, 1639-1720, and 2141-2192 of the MLH1 gene.

[0547] E98. The dsRNA of any one of E92-E95, wherein the region the sense or antisense strand is complementary to is at least 15 contiguous nucleotides of an MLH1 gene corresponding to reference mRNA NM_000249.3 at one or more of positions 267-388, 417-545, 805-878, 903-995, 1639-1727, 1849-1900, 2141-2207, 2337-2387, and 2426-2479 of the MLH1 gene.

[0548] E99. The dsRNA of any one of E92-E95, wherein the region the sense or antisense strand is complementary to is at least 15 contiguous nucleotides of an MLH1 gene corresponding to reference mRNA NM_000249.3 at one or more of positions 153-176, 267-388, 417-545, 792-995, 1639-1727, 1849-1900, 2105-2207, 2337-2387, and 2426-2479 of the MLH1 gene.

[0549] E100. The dsRNA of any one of E92-E95, wherein the region the sense or antisense strand is complementary to is at least 15 contiguous nucleotides of an MLH1 gene corresponding to reference mRNA NM_000249.3 at one or more of positions 332-355, 459-545, 836-859, 1849-1900, 2141-2164, and 2426-2449 of the MLH1 gene.

[0550] E101. The dsRNA of any one of E92-E95, wherein the region the sense or antisense strand is complementary to is at least 15 contiguous nucleotides of an MLH1 gene corresponding to reference mRNA NM_000249.3 at one or more of positions 267-388, 417-545, 805-995, 1639-1722, 1849-1900, 2105-2207, 2337-2387, 2426-2479, and 2508-2600 of the MLH1 gene.

[0551] E102. The dsRNA of any one of E92-E95, wherein the antisense strand comprises an antisense nucleobase sequence selected from a list in Table 4, wherein the 5′ nucleotide represented by U of the antisense oligonucleotide is any nucleotide (e.g., U, A, G, C, T), and the sense strand comprises a sense nucleobase sequence complementary to the antisense nucleobase sequence, wherein the.

[0552] E103. The dsRNA of any one of E92-E95, wherein the antisense nucleobase sequence consists of an antisense strand in Table 4, wherein the 5′ nucleotide represented by U of the antisense oligonucleotide is any nucleotide (e.g., U, A, G, C, T), and the sense nucleobase sequence consists of a sequence complementary to the antisense nucleobase sequence.

[0553] E104. The dsRNA of any one of any one of E92-E95, wherein the sense strand comprises a sense nucleobase sequence selected from a list in Table 4, and the antisense strand comprises an antisense nucleobase sequence complementary to the sense nucleobase sequence.

[0554] E105. The dsRNA of any one of any one of E92-E95, wherein the sense nucleobase sequence consists of a sense sequence in Table 4, and the antisense nucleobase sequence consists of a sequence complementary to the sense nucleobase sequence.

[0555] E106. The dsRNA of any one of E92-E95, wherein the sense strand comprises a sense nucleobase sequence selected from any one of the lists in Tables 5-11, and the antisense strand comprises an antisense nucleobase sequence complementary to the sense nucleobase sequence.

[0556] E107. The dsRNA of any one of E92-E95, wherein the sense nucleobase sequence consists of a sense sequence in any one of Tables 5-11, and the antisense nucleobase sequence consists of a sequence complementary to the sense nucleobase sequence.

[0557] E108. The dsRNA of any one of E92-E95, wherein the antisense strand comprises an antisense nucleobase sequence selected from a list in Table 13, wherein the 5′ nucleotide represented by U of the antisense oligonucleotide is any nucleotide (e.g., U, A, G, C, T), and the sense strand comprises a sense nucleobase sequence complementary to the antisense nucleobase sequence.

[0558] E109. The dsRNA of any one of E92-E95, wherein the antisense nucleobase sequence consists of an antisense sequence in Table 13, wherein the 5′ nucleotide represented by U of the antisense oligonucleotide is any nucleotide (e.g., U, A, G, C, T), and the sense nucleobase sequence consists of a sequence complementary to the antisense nucleobase sequence.

[0559] E110. The dsRNA of any one of E92-E95, wherein the sense strand comprises a sense nucleobase sequence selected from a list in Table 13, and the antisense strand comprises an antisense nucleobase sequence complementary to the sense nucleobase sequence.

[0560] E111. The dsRNA of any one of E92-E95, wherein the sense nucleobase sequence consists of a sense sequence in Table 13, and the antisense nucleobase sequence consists of a sequence complementary to the sense nucleobase sequence.

[0561] E112. The dsRNA of any one of E92-E111, wherein the dsRNA comprises at least one alternative nucleobase, at least one alternative internucleoside linkage, and/or at least one alternative sugar moiety.

[0562] E113. The dsRNA of E112, wherein the at least one alternative internucleoside linkage is a phosphorothioate internucleoside linkage.

[0563] E114. The dsRNA of E112, wherein the at least one alternative internucleoside linkage is a 2′-alkoxy internucleoside linkage.

[0564] E115. The dsRNA of E112, wherein the at least one alternative internucleoside linkage is an alkyl phosphate internucleoside linkage.

[0565] E116. The dsRNA of E112, wherein the at least one alternative nucleobase is 5′-methylcytosine, pseudouridine, or 5-methoxyuridine.

[0566] E117. The dsRNA of E112, wherein the alternative sugar moiety is 2′-OMe or a bicyclic nucleic acid.

[0567] E118. The dsRNA of any one of E92-E117, wherein the dsRNA comprises at least one 2′-OMe sugar moiety and at least one phosphorothioate internucleoside linkage.

[0568] E119. The dsRNA of any one of E92-E118, wherein the dsRNA further comprises a ligand conjugated to the 3′ end of the sense strand through a monovalent or branched bivalent or trivalent linker.

[0569] E120. The dsRNA of any one of E92-E119, wherein the sense strand comprises a nucleobase sequence of any one of SEQ ID NOs: 1486, 1492, 1494, 1496, 1536, 1544, 1546, 1560, 1562, 1564, 1584, 1598, 1604, 1608, 1622, 1624, 1630, 1660, 1710, 1720, 1722, 1726, 1728, 1732, 1734, 1736, 1748, 1752, 1756, 1758, 1762, 1764, 1772, 1954, 1960, 1966, 1972, 1974, 1976, 1998, 2008, 2012, 2024, 2034, 2038, 2052, 2054, 2080, 2086, 2114, 2116, 2120, 2122, 2158, 2162, 2176, 2178, 2570, 2588, 2598, 2604, 2608, 2612, 2616, 2618, 2622, 2628, 2720, 2744, 2746, 2748, 2752, 2894, 2898, 2902, 2906, 2916, 2922, 2924, 2928, 2936, 2938, 2940, 2944, 2948, 2966, 3064, 3066, 3084, 3088, 3120, 3122, 3124, 3130, 3134, 3136, 3148, 3164, 3210, 3212, 3216, 3248, 3272, 3274, 3276, 3278, and 3288.

[0570] E121. The dsRNA of any one of E92-E119, wherein the sense strand comprises a nucleobase sequence of any one of SEQ ID NOs: 1584, 1598, 1604, 1608, 1622, 1624, 1630, 1710, 1720, 1722, 1726, 1728, 1732, 1734, 1736, 1748, 1752, 1756, 1758, 1762, 1954, 1960, 1966, 1972, 1974, 1976, 1998, 2008, 2012, 2024, 2034, 2038, 2052, 2054, 2080, 2086, 2570, 2588, 2598, 2604, 2608, 2612, 2616, 2618, 2622, 2628, 2916, 2922, 2924, 2928, 2936, 2938, 2940, 2944, 2948, and 2966.

[0571] E122. The dsRNA of any one of E92-E119, wherein the sense strand comprises a nucleobase sequence of any one of SEQ ID NOs: 1536, 1544, 1546, 1560, 1562, 1564, 1584, 1598, 1604, 1608, 1622, 1624, 1630, 1660, 1710, 1720, 1722, 1726, 1728, 1732, 1734, 1736, 1748, 1752, 1756, 1758, 1762, 1764, 1772, 1954, 1960, 1966, 1972, 1974, 1976, 1998, 2008, 2012, 2024, 2034, 2038, 2052, 2054, 2080, 2086, 2114, 2116, 2120, 2122, 2158, 2162, 2176, 2178, 2570, 2588, 2598, 2604, 2608, 2612, 2616, 2618, 2622, 2628, 2720, 2744, 2746, 2748, 2752, 2916, 2922, 2924, 2928, 2936, 2938, 2940, 2944, 2948, 2966, 3064, 3066, 3084, 3088, 3120, 3122, 3124, 3130, 3134, 3136, 3148, and 3164.

[0572] E123. The dsRNA of any one of E92-E119, wherein the sense strand comprises a nucleobase sequence of any one of SEQ ID NOs: 1486, 1492, 1494, 1496, 1536, 1544, 1546, 1560, 1562, 1564, 1584, 1598, 1604, 1608, 1622, 1624, 1630, 1660, 1710, 1720, 1722, 1726, 1728, 1732, 1734, 1736, 1748, 1752, 1756, 1758, 1762, 1764, 1772, 1954, 1960, 1966, 1972, 1974, 1976, 1998, 2008, 2012, 2024, 2034, 2038, 2052, 2054, 2080, 2086, 2114, 2116, 2120, 2122, 2158, 2162, 2176, 2178, 2570, 2588, 2598, 2604, 2608, 2612, 2616, 2618, 2622, 2628, 2720, 2744, 2746, 2748, 2752, 2894, 2898, 2902, 2906, 2916, 2922, 2924, 2928, 2936, 2938, 2940, 2944, 2948, 2966, 3064, 3066, 3084, 3088, 3120, 3122, 3124, 3130, 3134, 3136, 3148, and 3164.

[0573] E124. The dsRNA of any one of E92-E119, wherein the sense strand comprises a nucleobase sequence of any one of SEQ ID NOs: 1584, 1598, 1604, 1608, 1710, 1720, 1722, 1726, 1728, 1732, 1734, 1736, 1748, 1752, 1756, 1758, 1762, 1764, 1772, 1998, 2008, 2012, 2024, 2720, 2744, 2746, 2748, 2752, 2916, 2922, 2924, 2928, 2936, 2938, 2940, 2944, 3120, 3122, 3124, 3130, 3134, 3136, and 3148.

[0574] E125. The dsRNA of any one of E92-E119, wherein the sense strand comprises a nucleobase sequence of any one of SEQ ID NOs: 1536, 1544, 1546, 1560, 1562, 1564, 1584, 1598, 1604, 1608, 1622, 1624, 1630, 1660, 1710, 1720, 1722, 1726, 1728, 1732, 1734, 1736, 1748, 1752, 1756, 1758, 1762, 1764, 1772, 1954, 1960, 1966, 1972, 1974, 1976, 1998, 2008, 2012, 2024, 2034, 2038, 2052, 2054, 2080, 2086, 2114, 2116, 2120, 2122, 2158, 2162, 2176, 2178, 2570, 2588, 2598, 2604, 2608, 2612, 2616, 2618, 2622, 2628, 2720, 2744, 2746, 2748, 2752, 2894, 2898, 2902, 2906, 2916, 2922, 2924, 2928, 2936, 2938, 2940, 2944, 2948, 2966, 3064, 3066, 3084, 3088, 3120, 3122, 3124, 3130, 3134, 3136, 3148, 3164, 3210, 3212, 3216, 3248, 3272, 3274, 3276, 3278, and 3288.

[0575] E126. The dsRNA of any one of E92-E119, wherein the antisense strand comprises a nucleobase sequence of any one of SEQ ID NOs: 1487, 1493, 1495, 1497, 1537, 1545, 1547, 1561, 1563, 1565, 1585, 1599, 1605, 1609, 1623, 1625, 1631, 1661, 1711, 1721, 1723, 1727, 1729, 1733, 1735, 1737, 1749, 1753, 1757, 1759, 1763, 1765, 1773, 1955, 1961, 1967, 1973, 1975, 1977, 1999, 2009, 2013, 2025, 2035, 2039, 2053, 2055, 2081, 2087, 2115, 2117, 2121, 2123, 2159, 2163, 2177, 2179, 2571, 2589, 2599, 2605, 2609, 2613, 2617, 2619, 2623, 2629, 2721, 2745, 2747, 2749, 2753, 2895, 2899, 2903, 2907, 2917, 2923, 2925, 2929, 2937, 2939, 2941, 2945, 2949, 2967, 3065, 3067, 3085, 3089, 3121, 3123, 3125, 3131, 3135, 3137, 3149, 3165, 3211, 3213, 3217, 3249, 3273, 3275, 3277, 3279, and 3289, wherein the 5′ nucleotide represented by U of the antisense oligonucleotide is any nucleotide (e.g., U, A, G, C, T).

[0576] E127. The dsRNA of any one of E92-E119, wherein the antisense strand comprises a nucleobase sequence of any one of SEQ ID NOs: 1585, 1599, 1605, 1609, 1623, 1625, 1631, 1711, 1721, 1723, 1727, 1729, 1733, 1735, 1737, 1749, 1753, 1757, 1759, 1763, 1955, 1961, 1967, 1973, 1975, 1977, 1999, 2009, 2013, 2025, 2035, 2039, 2053, 2055, 2081, 2087, 2571, 2589, 2599, 2605, 2609, 2613, 2617, 2619, 2623, 2629, 2917, 2923, 2925, 2929, 2937, 2939, 2941, 2945, 2949, and 2967, wherein the 5′ nucleotide represented by U of the antisense oligonucleotide is any nucleotide (e.g., U, A, G, C, T).

[0577] E128. The dsRNA of any one of E92-E119, wherein the antisense strand comprises a nucleobase sequence of any one of SEQ ID NOs: 1537, 1545, 1547, 1561, 1563, 1565, 1585, 1599, 1605, 1609, 1623, 1625, 1631, 1661, 1711, 1721, 1723, 1727, 1729, 1733, 1735, 1737, 1749, 1753, 1757, 1759, 1763, 1765, 1773, 1955, 1961, 1967, 1973, 1975, 1977, 1999, 2009, 2013, 2025, 2035, 2039, 2053, 2055, 2081, 2087, 2115, 2117, 2121, 2123, 2159, 2163, 2177, 2179, 2571, 2589, 2599, 2605, 2609, 2613, 2617, 2619, 2623, 2629, 2721, 2745, 2747, 2749, 2753, 2917, 2923, 2925, 2929, 2937, 2939, 2941, 2945, 2949, 2967, 3065, 3067, 3085, 3089, 3121, 3123, 3125, 3131, 3135, 3137, 3149, and 3165, wherein the 5′ nucleotide represented by U of the antisense oligonucleotide is any nucleotide (e.g., U, A, G, C, T).

[0578] E129. The dsRNA of any one of E92-E119, wherein the antisense strand comprises a nucleobase sequence of any one of SEQ ID NOs: 1487, 1493, 1495, 1497, 1537, 1545, 1547, 1561, 1563, 1565, 1585, 1599, 1605, 1609, 1623, 1625, 1631, 1661, 1711, 1721, 1723, 1727, 1729, 1733, 1735, 1737, 1749, 1753, 1757, 1759, 1763, 1765, 1773, 1955, 1961, 1967, 1973, 1975, 1977, 1999, 2009, 2013, 2025, 2035, 2039, 2053, 2055, 2081, 2087, 2115, 2117, 2121, 2123, 2159, 2163, 2177, 2179, 2571, 2589, 2599, 2605, 2609, 2613, 2617, 2619, 2623, 2629, 2721, 2745, 2747, 2749, 2753, 2895, 2899, 2903, 2907, 2917, 2923, 2925, 2929, 2937, 2939, 2941, 2945, 2949, 2967, 3065, 3067, 3085, 3089, 3121, 3123, 3125, 3131, 3135, 3137, 3149, and 3165, wherein the 5′ nucleotide represented by U of the antisense oligonucleotide is any nucleotide (e.g., U, A, G, C, T).

[0579] E130. The dsRNA of any one of E92-E119, wherein the antisense strand comprises a nucleobase sequence of any one of SEQ ID NOs: 1585, 1599, 1605, 1609, 1711, 1721, 1723, 1727, 1729, 1733, 1735, 1737, 1749, 1753, 1757, 1759, 1763, 1765, 1773, 1999, 2009, 2013, 2025, 2721, 2745, 2747, 2749, 2753, 2917, 2923, 2925, 2929, 2937, 2939, 2941, 2945, 3121, 3123, 3125, 3131, 3135, 3137, and 3149, wherein the 5′ nucleotide represented by U of the antisense oligonucleotide is any nucleotide (e.g., U, A, G, C, T).

[0580] E131. The dsRNA of any one of E92-E119, wherein the antisense strand comprises a nucleobase sequence of any one of SEQ ID NOs: 1537, 1545, 1547, 1561, 1563, 1565, 1585, 1599, 1605, 1609, 1623, 1625, 1631, 1661, 1711, 1721, 1723, 1727, 1729, 1733, 1735, 1737, 1749, 1753, 1757, 1759, 1763, 1765, 1773, 1955, 1961, 1967, 1973, 1975, 1977, 1999, 2009, 2013, 2025, 2035, 2039, 2053, 2055, 2081, 2087, 2115, 2117, 2121, 2123, 2159, 2163, 2177, 2179, 2571, 2589, 2599, 2605, 2609, 2613, 2617, 2619, 2623, 2629, 2721, 2745, 2747, 2749, 2753, 2895, 2899, 2903, 2907, 2917, 2923, 2925, 2929, 2937, 2939, 2941, 2945, 2949, 2967, 3065, 3067, 3085, 3089, 3121, 3123, 3125, 3131, 3135, 3137, 3149, 3165, 3211, 3213, 3217, 3249, 3273, 3275, 3277, 3279, and 3289, wherein the 5′ nucleotide represented by U of the antisense oligonucleotide is any nucleotide (e.g., U, A, G, C, T).

[0581] E132. The dsRNA of any one of E92-E119, wherein the sense strand consists of a nucleobase sequence of any one of SEQ ID NOs: 1486, 1492, 1494, 1496, 1536, 1544, 1546, 1560, 1562, 1564, 1584, 1598, 1604, 1608, 1622, 1624, 1630, 1660, 1710, 1720, 1722, 1726, 1728, 1732, 1734, 1736, 1748, 1752, 1756, 1758, 1762, 1764, 1772, 1954, 1960, 1966, 1972, 1974, 1976, 1998, 2008, 2012, 2024, 2034, 2038, 2052, 2054, 2080, 2086, 2114, 2116, 2120, 2122, 2158, 2162, 2176, 2178, 2570, 2588, 2598, 2604, 2608, 2612, 2616, 2618, 2622, 2628, 2720, 2744, 2746, 2748, 2752, 2894, 2898, 2902, 2906, 2916, 2922, 2924, 2928, 2936, 2938, 2940, 2944, 2948, 2966, 3064, 3066, 3084, 3088, 3120, 3122, 3124, 3130, 3134, 3136, 3148, 3164, 3210, 3212, 3216, 3248, 3272, 3274, 3276, 3278, and 3288.

[0582] E133. The dsRNA of any one of E92-E119, wherein the sense strand consists of a nucleobase sequence of any one of SEQ ID NOs: 1584, 1598, 1604, 1608, 1622, 1624, 1630, 1710, 1720, 1722, 1726, 1728, 1732, 1734, 1736, 1748, 1752, 1756, 1758, 1762, 1954, 1960, 1966, 1972, 1974, 1976, 1998, 2008, 2012, 2024, 2034, 2038, 2052, 2054, 2080, 2086, 2570, 2588, 2598, 2604, 2608, 2612, 2616, 2618, 2622, 2628, 2916, 2922, 2924, 2928, 2936, 2938, 2940, 2944, 2948, and 2966.

[0583] E134. The dsRNA of any one of E92-E119, wherein the sense strand consists of a nucleobase sequence of any one of SEQ ID NOs: 1536, 1544, 1546, 1560, 1562, 1564, 1584, 1598, 1604, 1608, 1622, 1624, 1630, 1660, 1710, 1720, 1722, 1726, 1728, 1732, 1734, 1736, 1748, 1752, 1756, 1758, 1762, 1764, 1772, 1954, 1960, 1966, 1972, 1974, 1976, 1998, 2008, 2012, 2024, 2034, 2038, 2052, 2054, 2080, 2086, 2114, 2116, 2120, 2122, 2158, 2162, 2176, 2178, 2570, 2588, 2598, 2604, 2608, 2612, 2616, 2618, 2622, 2628, 2720, 2744, 2746, 2748, 2752, 2916, 2922, 2924, 2928, 2936, 2938, 2940, 2944, 2948, 2966, 3064, 3066, 3084, 3088, 3120, 3122, 3124, 3130, 3134, 3136, 3148, and 3164.

[0584] E135. The dsRNA of any one of E92-E119, wherein the sense strand consists of a nucleobase sequence of any one of SEQ ID NOs: 1486, 1492, 1494, 1496, 1536, 1544, 1546, 1560, 1562, 1564, 1584, 1598, 1604, 1608, 1622, 1624, 1630, 1660, 1710, 1720, 1722, 1726, 1728, 1732, 1734, 1736, 1748, 1752, 1756, 1758, 1762, 1764, 1772, 1954, 1960, 1966, 1972, 1974, 1976, 1998, 2008, 2012, 2024, 2034, 2038, 2052, 2054, 2080, 2086, 2114, 2116, 2120, 2122, 2158, 2162, 2176, 2178, 2570, 2588, 2598, 2604, 2608, 2612, 2616, 2618, 2622, 2628, 2720, 2744, 2746, 2748, 2752, 2894, 2898, 2902, 2906, 2916, 2922, 2924, 2928, 2936, 2938, 2940, 2944, 2948, 2966, 3064, 3066, 3084, 3088, 3120, 3122, 3124, 3130, 3134, 3136, 3148, and 3164.

[0585] E136. The dsRNA of any one of E92-E119, wherein the sense strand consists of a nucleobase sequence of any one of SEQ ID NOs: 1584, 1598, 1604, 1608, 1710, 1720, 1722, 1726, 1728, 1732, 1734, 1736, 1748, 1752, 1756, 1758, 1762, 1764, 1772, 1998, 2008, 2012, 2024, 2720, 2744, 2746, 2748, 2752, 2916, 2922, 2924, 2928, 2936, 2938, 2940, 2944, 3120, 3122, 3124, 3130, 3134, 3136, and 3148.

[0586] E137. The dsRNA of any one of E92-E119, wherein the sense strand consists of a nucleobase sequence of any one of SEQ ID NOs: 1536, 1544, 1546, 1560, 1562, 1564, 1584, 1598, 1604, 1608, 1622, 1624, 1630, 1660, 1710, 1720, 1722, 1726, 1728, 1732, 1734, 1736, 1748, 1752, 1756, 1758, 1762, 1764, 1772, 1954, 1960, 1966, 1972, 1974, 1976, 1998, 2008, 2012, 2024, 2034, 2038, 2052, 2054, 2080, 2086, 2114, 2116, 2120, 2122, 2158, 2162, 2176, 2178, 2570, 2588, 2598, 2604, 2608, 2612, 2616, 2618, 2622, 2628, 2720, 2744, 2746, 2748, 2752, 2894, 2898, 2902, 2906, 2916, 2922, 2924, 2928, 2936, 2938, 2940, 2944, 2948, 2966, 3064, 3066, 3084, 3088, 3120, 3122, 3124, 3130, 3134, 3136, 3148, 3164, 3210, 3212, 3216, 3248, 3272, 3274, 3276, 3278, and 3288.

[0587] E138. The dsRNA of any one of E92-E119, wherein the antisense strand consists of a nucleobase sequence of any one of SEQ ID NOs: 1487, 1493, 1495, 1497, 1537, 1545, 1547, 1561, 1563, 1565, 1585, 1599, 1605, 1609, 1623, 1625, 1631, 1661, 1711, 1721, 1723, 1727, 1729, 1733, 1735, 1737, 1749, 1753, 1757, 1759, 1763, 1765, 1773, 1955, 1961, 1967, 1973, 1975, 1977, 1999, 2009, 2013, 2025, 2035, 2039, 2053, 2055, 2081, 2087, 2115, 2117, 2121, 2123, 2159, 2163, 2177, 2179, 2571, 2589, 2599, 2605, 2609, 2613, 2617, 2619, 2623, 2629, 2721, 2745, 2747, 2749, 2753, 2895, 2899, 2903, 2907, 2917, 2923, 2925, 2929, 2937, 2939, 2941, 2945, 2949, 2967, 3065, 3067, 3085, 3089, 3121, 3123, 3125, 3131, 3135, 3137, 3149, 3165, 3211, 3213, 3217, 3249, 3273, 3275, 3277, 3279, and 3289, wherein the 5′ nucleotide represented by U of the antisense oligonucleotide is any nucleotide (e.g., U, A, G, C, T).

[0588] E139. The dsRNA of any one of E92-E119, wherein the antisense strand consists of a nucleobase sequence of any one of SEQ ID NOs: 1585, 1599, 1605, 1609, 1623, 1625, 1631, 1711, 1721, 1723, 1727, 1729, 1733, 1735, 1737, 1749, 1753, 1757, 1759, 1763, 1955, 1961, 1967, 1973, 1975, 1977, 1999, 2009, 2013, 2025, 2035, 2039, 2053, 2055, 2081, 2087, 2571, 2589, 2599, 2605, 2609, 2613, 2617, 2619, 2623, 2629, 2917, 2923, 2925, 2929, 2937, 2939, 2941, 2945, 2949, and 2967, wherein the 5′ nucleotide represented by U of the antisense oligonucleotide is any nucleotide (e.g., U, A, G, C, T).

[0589] E140. The dsRNA of any one of E92-E119, wherein the antisense strand consists of a nucleobase sequence of any one of SEQ ID NOs: 1537, 1545, 1547, 1561, 1563, 1565, 1585, 1599, 1605, 1609, 1623, 1625, 1631, 1661, 1711, 1721, 1723, 1727, 1729, 1733, 1735, 1737, 1749, 1753, 1757, 1759, 1763, 1765, 1773, 1955, 1961, 1967, 1973, 1975, 1977, 1999, 2009, 2013, 2025, 2035, 2039, 2053, 2055, 2081, 2087, 2115, 2117, 2121, 2123, 2159, 2163, 2177, 2179, 2571, 2589, 2599, 2605, 2609, 2613, 2617, 2619, 2623, 2629, 2721, 2745, 2747, 2749, 2753, 2917, 2923, 2925, 2929, 2937, 2939, 2941, 2945, 2949, 2967, 3065, 3067, 3085, 3089, 3121, 3123, 3125, 3131, 3135, 3137, 3149, and 3165, wherein the 5′ nucleotide represented by U of the antisense oligonucleotide is any nucleotide (e.g., U, A, G, C, T).

[0590] E141. The dsRNA of any one of E92-E119, wherein the antisense strand consists of a nucleobase sequence of any one of SEQ ID NOs: 1487, 1493, 1495, 1497, 1537, 1545, 1547, 1561, 1563, 1565, 1585, 1599, 1605, 1609, 1623, 1625, 1631, 1661, 1711, 1721, 1723, 1727, 1729, 1733, 1735, 1737, 1749, 1753, 1757, 1759, 1763, 1765, 1773, 1955, 1961, 1967, 1973, 1975, 1977, 1999, 2009, 2013, 2025, 2035, 2039, 2053, 2055, 2081, 2087, 2115, 2117, 2121, 2123, 2159, 2163, 2177, 2179, 2571, 2589, 2599, 2605, 2609, 2613, 2617, 2619, 2623, 2629, 2721, 2745, 2747, 2749, 2753, 2895, 2899, 2903, 2907, 2917, 2923, 2925, 2929, 2937, 2939, 2941, 2945, 2949, 2967, 3065, 3067, 3085, 3089, 3121, 3123, 3125, 3131, 3135, 3137, 3149, and 3165, wherein the 5′ nucleotide represented by U of the antisense oligonucleotide is any nucleotide (e.g., U, A, G, C, T).

[0591] E142. The dsRNA of any one of E92-E119, wherein the antisense strand consists of a nucleobase sequence of any one of SEQ ID NOs: 1585, 1599, 1605, 1609, 1711, 1721, 1723, 1727, 1729, 1733, 1735, 1737, 1749, 1753, 1757, 1759, 1763, 1765, 1773, 1999, 2009, 2013, 2025, 2721, 2745, 2747, 2749, 2753, 2917, 2923, 2925, 2929, 2937, 2939, 2941, 2945, 3121, 3123, 3125, 3131, 3135, 3137, and 3149, wherein the 5′ nucleotide represented by U of the antisense oligonucleotide is any nucleotide (e.g., U, A, G, C, T).

[0592] E143. The dsRNA of any one of E92-E119, wherein the antisense strand consists of a nucleobase sequence of any one of SEQ ID NOs: 1537, 1545, 1547, 1561, 1563, 1565, 1585, 1599, 1605, 1609, 1623, 1625, 1631, 1661, 1711, 1721, 1723, 1727, 1729, 1733, 1735, 1737, 1749, 1753, 1757, 1759, 1763, 1765, 1773, 1955, 1961, 1967, 1973, 1975, 1977, 1999, 2009, 2013, 2025, 2035, 2039, 2053, 2055, 2081, 2087, 2115, 2117, 2121, 2123, 2159, 2163, 2177, 2179, 2571, 2589, 2599, 2605, 2609, 2613, 2617, 2619, 2623, 2629, 2721, 2745, 2747, 2749, 2753, 2895, 2899, 2903, 2907, 2917, 2923, 2925, 2929, 2937, 2939, 2941, 2945, 2949, 2967, 3065, 3067, 3085, 3089, 3121, 3123, 3125, 3131, 3135, 3137, 3149, 3165, 3211, 3213, 3217, 3249, 3273, 3275, 3277, 3279, and 3289, wherein the 5′ nucleotide represented by U of the antisense oligonucleotide is any nucleotide (e.g., U, A, G, C, T).

[0593] E144. The dsRNA of any one of E92-E143, wherein the dsRNA exhibits at least 50% mRNA inhibition at a 0.5 nM dsRNA concentration when determined using a cell assay when compared with a control cell.

[0594] E145. The dsRNA of any one of E92-E143, wherein the dsRNA exhibits at least 40% mRNA inhibition at a 0.5 nM dsRNA concentration when determined using a cell assay when compared with a control cell.

[0595] E146. The dsRNA of any one of E92-E143, wherein the dsRNA exhibits at least 30% mRNA inhibition at a 0.5 nM dsRNA concentration when determined using a cell assay when compared with a control cell.

[0596] E147. The dsRNA of any one of E92-E143, wherein the dsRNA exhibits at least 60% mRNA inhibition at a 10 nM dsRNA concentration when determined using a cell assay when compared with a control cell.

[0597] E148. The dsRNA of any one of E92-E143, wherein the dsRNA exhibits at least 50% mRNA inhibition at a 10 nM dsRNA concentration when determined using a cell assay when compared with a control cell.

[0598] E149. The dsRNA of any one of E92-E148, wherein the antisense strand is complementary to at least 17 contiguous nucleotides of an MLH1 gene.

[0599] E150. The dsRNA of any one of E92-E148, wherein the antisense strand is complementary to at least 19 contiguous nucleotides of an MLH1 gene.

[0600] E151. The dsRNA of any one of E92-E148, wherein the antisense strand is complementary to 19 contiguous nucleotides of an MLH1 gene.

[0601] E152. The dsRNA of any one of E92-E151, wherein the antisense strand and/or the sense strand comprises a 3′ overhang of at least 1 linked nucleoside; or a 3′ overhang of at least 2 linked nucleosides.

[0602] E153. A pharmaceutical composition comprising the dsRNA of any one of E92-E152 and a pharmaceutically acceptable carrier.

[0603] E154. A composition comprising the dsRNA of any one of E92-E152 and a lipid nanoparticle, a polyplex nanoparticle, a lipoplex nanoparticle, or a liposome.

[0604] E155. A vector encoding at least one strand of the dsRNA of any one of E92-E152.

[0605] E156. A cell comprising the vector of E155.

[0606] E157. A method of reducing transcription of MLH1 in a cell, the method comprising contacting the cell with the dsRNA of any one of E92-E152, the pharmaceutical composition of E153, the composition of E154, the vector of E155, or the cell of E156 for a time sufficient to obtain degradation of an mRNA transcript of MLH1, thereby reducing expression of MLH1 in the cell.

[0607] E158. A method of treating, preventing, or delaying progression of a trinucleotide repeat expansion disorder in a subject in need thereof, the method comprising administering to the subject the dsRNA of any one of E92-E152, the pharmaceutical composition of E153, the composition of E154, the vector of E155, or the cell of E156.

[0608] E159. A method of reducing the level and/or activity of MLH1 in a cell of a subject identified as having a trinucleotide repeat expansion disorder, the method comprising contacting the cell with the dsRNA of any one of E92-E152, the pharmaceutical composition of E153, the composition of E154, the vector of E155, or the cell of E156.

[0609] E160. A method for reducing expression of MLH1 in a cell comprising contacting the cell with the dsRNA of any one of E92-E152, the pharmaceutical composition of E153, the composition of E154, the vector of E155, or the cell of E156 and maintaining the cell for a time sufficient to obtain degradation of an mRNA transcript of MLH1, thereby reducing expression of MLH1 in the cell.

[0610] E161. A method of decreasing trinucleotide repeat expansion in a cell, the method comprising contacting the cell with the dsRNA of any one of E92-E152, the pharmaceutical composition of E153, the composition of E154, the vector of E155, or the cell of E156.

[0611] E162. The method of E160 or E161, wherein the cell is in a subject.

[0612] E163. The method of any one of E158, E159, and E162, wherein the subject is a human.

[0613] E164. The method of any one of E158-E162, wherein the cell is a cell of the central nervous system or a muscle cell.

[0614] E165. The method of any one of E158, E166, and E162-E164, wherein the subject is identified as having a trinucleotide repeat expansion disorder.

[0615] E166. The method of any one of E158, E159, and E161-E163, wherein the trinucleotide repeat expansion disorder is a polyglutamine disease.

[0616] E167. The method of E166, wherein the polyglutamine disease is selected from the group consisting of dentatorubropallidoluysian atrophy, Huntington's disease, spinal and bulbar muscular atrophy, spinocerebellar ataxia type 1, spinocerebellar ataxia type 2, spinocerebellar ataxia type 3, spinocerebellar ataxia type 6, spinocerebellar ataxia type 7, spinocerebellar ataxia type 17, and Huntington's disease-like 2.

[0617] E168. The method of any one of E158, E159, and E161-E163, wherein the trinucleotide repeat expansion disorder is a non-polyglutamine disease.

[0618] E169. The method of E168, wherein the non-polyglutamine disease is selected from the group consisting of fragile X syndrome, fragile X-associated tremor/ataxia syndrome, fragile XE mental retardation, Friedreich's ataxia, myotonic dystrophy type 1, spinocerebellar ataxia type 8, spinocerebellar ataxia type 12, oculopharyngeal muscular dystrophy, Fragile X-associated premature ovarian failure, FRA2A syndrome, FRA7A syndrome, and early infantile epileptic encephalopathy.

[0619] E170. A dsRNA of any one of E92-E152, the pharmaceutical composition of E153, the composition of E154, the vector of E155, or the cell of E156 for use in prevention or treatment of a trinucleotide repeat expansion disorder.

[0620] E171. The dsRNA, the pharmaceutical composition, the composition, the vector, or the cell of E170, wherein the trinucleotide repeat expansion disorder is selected from the group consisting of dentatorubropallidoluysian atrophy, Huntington's disease, spinal and bulbar muscular atrophy, spinocerebellar ataxia type 1, spinocerebellar ataxia type 2, spinocerebellar ataxia type 3, spinocerebellar ataxia type 6, spinocerebellar ataxia type 7, spinocerebellar ataxia type 17, Huntington's disease-like 2, fragile X syndrome, fragile X-associated tremor/ataxia syndrome, fragile XE mental retardation, Friedreich's ataxia, myotonic dystrophy type 1, spinocerebellar ataxia type 8, spinocerebellar ataxia type 12, oculopharyngeal muscular dystrophy, Fragile X-associated premature ovarian failure, FRA2A syndrome, FRA7A syndrome, and early infantile epileptic encephalopathy.

[0621] E172. The dsRNA, the pharmaceutical composition, the composition, the vector, or the cell of E170 or E171, wherein the trinucleotide repeat expansion disorder is Huntington's disease.

[0622] E173. The dsRNA, the pharmaceutical composition, the composition, the vector, or the cell of E170 or E171, wherein the trinucleotide repeat expansion disorder is Friedreich's ataxia.

[0623] E174. The dsRNA, the pharmaceutical composition, the composition, the vector, or the cell of E170 or E171, wherein the trinucleotide repeat expansion disorder is myotonic dystrophy type 1.

[0624] E175. The dsRNA, the pharmaceutical composition, the composition, the vector, or the cell of any of E170-E174, wherein the dsRNA, pharmaceutical composition, composition, vector, or cell is administered intrathecally.

[0625] E176. The dsRNA, the pharmaceutical composition, the composition, the vector, or the cell of any of E170-E174, wherein the dsRNA, pharmaceutical composition, composition, vector, or cell is administered intraventricularly.

[0626] E177. The dsRNA, the pharmaceutical composition, the composition, the vector, or the cell for use of any of E170-E174, wherein the dsRNA, pharmaceutical composition, composition, vector, or cell is administered intramuscularly.

[0627] E178. A method of treating, preventing, or delaying progression of a disorder in a subject in need thereof wherein the subject is suffering from trinucleotide repeat expansion disorder, comprising administering to said subject the dsRNA of any one of E92-E152, the pharmaceutical composition of E153, the composition of E154, the vector of E155, or the cell of E158.

[0628] E179. The method of E178, further comprising administering a second therapeutic agent.

[0629] E180. The method of E179, wherein the second therapeutic agent is an oligonucleotide that hybridizes to an mRNA encoding the Huntingtin gene.

[0630] E181. A method of preventing or delaying progression of a trinucleotide repeat expansion disorder in a subject, the method comprising administering to the subject the dsRNA of any one of E92-E152, the pharmaceutical composition of E153, the composition of E154, the vector of E155, or the cell of E156 in an amount effective to delay progression of a trinucleotide repeat expansion disorder of the subject.

[0631] E182. The method of E181, wherein the trinucleotide repeat expansion disorder is selected from the group consisting of dentatorubropallidoluysian atrophy, Huntington's disease, spinal and bulbar muscular atrophy, spinocerebellar ataxia type 1, spinocerebellar ataxia type 2, spinocerebellar ataxia type 3, spinocerebellar ataxia type 6, spinocerebellar ataxia type 7, spinocerebellar ataxia type 17, Huntington's disease-like 2, fragile X syndrome, fragile X-associated tremor/ataxia syndrome, fragile XE mental retardation, Friedreich's ataxia, myotonic dystrophy type 1, spinocerebellar ataxia type 8, spinocerebellar ataxia type 12, oculopharyngeal muscular dystrophy, Fragile X-associated premature ovarian failure, FRA2A syndrome, FRA7A syndrome, and early infantile epileptic encephalopathy.

[0632] E183. The method of E181 or E182, wherein the trinucleotide repeat expansion disorder is Huntington's disease.

[0633] E184. The method of E181 or E182, wherein the trinucleotide repeat expansion disorder is Friedrich's ataxia.

[0634] E185. The method of E181 or E182, wherein the trinucleotide repeat expansion disorder is myotonic dystrophy type 1.

[0635] E186. The method of E181 or E182, further comprising administering a second therapeutic agent.

[0636] E187. The method of E186, wherein the second therapeutic agent is an oligonucleotide that hybridizes to an mRNA encoding the Huntingtin gene.

[0637] E188. The method of any of E181-E187, wherein progression of the trinucleotide repeat expansion disorder is delayed by at least 120 days, for example, at least 6 months, at least 12 months, at least 2 years, at least 3 years, at least 4 years, at least 5 years, at least 10 years or more, when compared with a predicted progression.

[0638] E189. A dsRNA of any one of E92-E152, the pharmaceutical composition of E153, the composition of E154, the vector of E155, or the cell of E156 for use in preventing or delaying progression of a trinucleotide repeat expansion disorder in a subject.

[0639] E190. The dsRNA, the pharmaceutical composition, the composition, the vector, or the cell of E189, wherein the trinucleotide repeat expansion disorder is selected from the group consisting of dentatorubropallidoluysian atrophy, Huntington's disease, spinal and bulbar muscular atrophy, spinocerebellar ataxia type 1, spinocerebellar ataxia type 2, spinocerebellar ataxia type 3, spinocerebellar ataxia type 6, spinocerebellar ataxia type 7, spinocerebellar ataxia type 17, Huntington's disease-like 2, fragile X syndrome, fragile X-associated tremor/ataxia syndrome, fragile XE mental retardation, Friedreich's ataxia, myotonic dystrophy type 1, spinocerebellar ataxia type 8, spinocerebellar ataxia type 12, oculopharyngeal muscular dystrophy, Fragile X-associated premature ovarian failure, FRA2A syndrome, FRA7A syndrome, and early infantile epileptic encephalopathy.

[0640] E191. The dsRNA, the pharmaceutical composition, the composition, the vector, or the cell of E189 or E190, wherein the trinucleotide repeat expansion disorder is Huntington's disease.

[0641] E192. The dsRNA, the pharmaceutical composition, the composition, the vector, or the cell of E189 or E190, wherein the trinucleotide repeat expansion disorder is Friedrich's ataxia.

[0642] E193. The dsRNA, the pharmaceutical composition, the composition, the vector, or the cell of E189 or E190, wherein the trinucleotide repeat expansion disorder is myotonic dystrophy type 1.

[0643] E194. The dsRNA, the pharmaceutical composition, the composition, the vector, or the cell of any one of E189-E193, wherein progression of the trinucleotide repeat expansion disorder is delayed by at least 120 days, for example, at least 6 months, at least 12 months, at least 2 years, at least 3 years, at least 4 years, at least 5 years, at least 10 years or more, when compared with a predicted progression.

1. A single-stranded antisense oligonucleotide of 10-30 linked nucleosides in length, wherein the antisense oligonucleotide comprises a region of at least 10 contiguous nucleobases having at least 80% complementarity to an MLH1 gene.

2. The antisense oligonucleotide of claim 1, wherein the antisense oligonucleotide comprises:
(a) a DNA core sequence comprising linked deoxyribonucleosides;
(b) a 5′ flanking sequence comprising linked nucleosides; and
(c) a 3′ flanking sequence comprising linked nucleosides;
wherein the DNA core comprises a region of at least 10 contiguous nucleobases having at least 80% complementarity to an MLH1 gene and is positioned between the 5′ flanking sequence and the 3′ flanking sequence; wherein the 5′ flanking sequence and the 3′ flanking sequence each comprises at least two linked nucleosides; and wherein at least one nucleoside of each flanking sequence comprises an alternative nucleoside.

3. A single-stranded antisense oligonucleotide of 10-30 linked nucleosides in length for inhibiting expression of a human MLH1 gene in a cell, wherein the antisense oligonucleotide comprises a region of at least 10 contiguous nucleobases having at least 80% complementarity to an MLH1 gene.

4. The antisense oligonucleotide of claim 3, wherein the antisense oligonucleotide comprises:
(a) a DNA core comprising linked deoxyribonucleosides;
(b) a 5′ flanking sequence comprising linked nucleosides; and
(c) a 3′ flanking sequence comprising linked nucleosides;
wherein the DNA core comprises a region of at least 10 contiguous nucleobases having at least 80% complementarity to an MLH1 gene and is positioned between the 5′ flanking sequence and the 3′ flanking sequence; wherein the 5′ flanking sequence and the 3′ flanking sequence each comprises at least two linked nucleosides; and wherein at least one nucleoside of each flanking sequence comprises an alternative nucleoside.

5. The antisense oligonucleotide of any one of claims 1-4, wherein the region of at least 10 nucleobases has at least 90% complementary to an MLH1 gene.

6. The antisense oligonucleotide of any one of claims 1-5, wherein the region of at least 10 nucleobases has at least 95% complementary to an MLH1 gene.

7. The antisense oligonucleotide of any one of claims 1-6, wherein the region of at least 10 nucleobases is complementary to an MLH1 gene corresponding to a sequence of reference mRNA NM_000249.3 at one or more of positions 193-258, 289-607, 629-734, 757-836, 865-1125, 1177-1206, 1218-1286, 1324-1408, 1433-1747, 1759-1814, 1852-1901, 1959-2029, 2053-2240, 2250-2356, 2382-2479, 2510-2546, or 2573-2598 of the MLH1 gene.

8. The antisense oligonucleotide of any one of claims 1-6, wherein the region of at least 10 nucleobases is complementary to an MLH1 gene corresponding to a sequence of reference mRNA NM_000249.3 at one or more of positions 193-251, 289-607, 629-734, 757-836, 865-1125, 1177-1206, 1218-286, 1324-1408, 1433-1747, 1759-1814, 1852-1901, 1959-2029, 2053-2240, 2250-2356, 2382-2479, 2510-2546, or 2573-2598 of the MLH1 gene

9. The antisense oligonucleotide of any one of claims 1-6, wherein the region of at least 10 nucleobases is complementary to an MLH1 gene corresponding to a sequence of reference mRNA NM_000249.3 at one or more of positions 193-251, 289-607, 629-734, 758-836, 865-1125, 1177-1206, 1218-1286, 1324-1408, 1433-1747, 1759-1814, 1852-1901, 1959-2029, 2053-2240, 2250-2356, 2382-2479, 2510-2546, or 2573-2598 of the MLH1 gene.

10. The antisense oligonucleotide of any one of claims 1-6, wherein the region of at least 10 nucleobases is complementary to an MLH1 gene corresponding to a sequence of reference mRNA NM_000249.3 at one or more of positions 312-391, 410-508, 522-607, 629-726, 759-1125, 1177-1206, 1221-1286, 1324-1407, 1433-1747, 1764-1814, 1854-1901, 1959-2029, 2053-2113, 2184-2240, 2251-2283, 2303-2351, 2384-2479, or 2510-2546 of the MLH1 gene.

11. The antisense oligonucleotide of any one of claims 1-6, wherein the region of at least 10 nucleobases is complementary to an MLH1 gene corresponding to a sequence of reference mRNA NM_000249.3 at one or more of positions 575-602, 662-724, 805-830, 891-960, 1002-1027, 1056-1081, 1100-1125, 1342-1384, 1443-1498, 1513-1561, 1600-1625, 1652-1747, 1876-1901, 2001-2026, or 2430-2459 of the MLH1 gene.

12. The antisense oligonucleotide of any one of claims 1-6, wherein the region of at least 10 nucleobases is complementary to an MLH1 gene corresponding to a sequence of reference mRNA NM_000249.3 at one or more of positions 307-332, 458-500, 571-602, 758-787, 865-890, 892-917, 1045-1084, 1624-1649, 1786-1813, 1871-1901, 2053-2081, 2086-2114, or 2149-2176 of the MLH1 gene.

13. The antisense oligonucleotide of any one of claims 1-6, wherein the region of at least 10 nucleobases is complementary to an MLH1 gene corresponding to a sequence of reference mRNA NM_000249.3 at one or more of positions 575-602, 1056-1081, or 1876-1901 of the MLH1 gene.

14. The antisense oligonucleotide of any one of claims 1-6, wherein the antisense oligonucleotide comprises the nucleobase sequence of any one of SEQ ID NOs: 6-1393.

15. The antisense oligonucleotide of any one of claims 1-6, wherein the antisense oligonucleotide comprises the nucleobase sequence of any one of SEQ ID NOs: 81-84, 86-87, 90, 99-101, 106-107, 111, 113-114, 117, 122-126, 129-131, 137-138, 140, 144, 146-160, 172, 188-191, 211, 215-220, 222-226, 229, 231-239, 242-249, 270-271, 274-279, 286-293, 295-298, 310-320, 322-328, 332-335, 337, 345, 383-388, 397-402, 405-413, 415-421, 458, 473-474, 476-478, 482-487, 490-491, 493-494, 497-501, 522-526, 528-530, 542, 545-549, 551-560, 563-565, 585-586, 596-598, 600-610, 613, 619-622, 631-634, 636-637, 639-643, 645-646, 649-651, 655, 699, 701-709, 714-715, 729-731, 733-741, 744, 749, 752-754, 757, 765-766, 768-769, 788-791, 819, 827-835, 840-842, 845, 847, 850, 852-853, 857, 859, 861, 866-872, 877-882, 884-887, 889-890, 893-894, 901, 923-931, 936-939, 975, 977, 981-986, 1019, 1023-1032, 1034, 1036-1041, 1083-1087, 1089, 1101, 1104-1105, 1107, 1109-1112, 1118-1123, 1131-1134, 1136, 1138-1139, 1140-1144, 1151-1152, 1161-1163, 1187-1192, 1194-1195, 1197, 1199-1201, 1204, 1207, 1209, 1214-1216, 1218, 1220-1223, 1239-1241, 1244, 1247, 1257-1259, 1262-1270, 1273-1275, 1277-1278, 1314-1315, or 1343.

16. The antisense oligonucleotide of any one of claims 1-6, wherein the antisense oligonucleotide comprises the nucleobase sequence of any one of SEQ ID NOs: 81-84, 86-87, 99-101, 106, 113-114, 122-126, 129-131, 137-138, 140, 144, 146-159, 172, 188-191, 211, 215-217, 219, 223-226, 229, 232-239, 242-249, 270-271, 274-279, 286-293, 295-298, 310-320, 322-328, 332-335, 337, 345, 384-388, 397-402, 405-421, 458, 473-474, 476-478, 482-487, 490-491, 493-494, 497-501, 522-526, 528-530, 542, 545-549, 551-560, 563-565, 585-586, 596-610, 613, 619-622, 631-634, 636-637, 639-643, 645-646, 649-651, 655, 699-709, 714-715, 729-731, 733-741, 744, 749, 752-754, 757, 765-766, 768-769, 788-791, 819, 827-835, 840-842, 845, 847, 850, 852-853, 857, 859, 861, 866-872, 877-882, 884-887, 889-890, 893-894, 901, 923-931, 936-939, 975, 977, 981-986, 1019, 1023-1032, 1034, 1036-1041, 1083-1087, 1089, 1101, 1104-1105, 1107, 1109-1112, 1118-1123, 1131-1134, 1136, 1138-1144, 1151-1152, 1161-1163, 1187-1191, 1194-1195, 1197, 1199-1201, 1204, 1207, 1209, 1214-1216, 1218, 1220-1223, 1239-1241, 1244, 1247, 1257-1259, 1262-1270, 1273-1275, 1277-1278, 1314-1315, or 1343.

17. The antisense oligonucleotide of any one of claims 1-6, wherein the antisense oligonucleotide comprises the nucleobase sequence of any one of SEQ ID NOs: 81-87, 99-101, 106, 113-114, 122-126, 129-131, 137-138, 140, 144, 146, 147, 148-151, 153-159, 172, 188-191, 211215-217, 219, 223-226, 229, 232-239, 242-245, 248-249, 270-271274-276, 278-279, 286-293, 295-298, 310-320, 322-338, 332-335, 337, 345, 384-386, 387-388, 397-402, 405-413, 415-421, 458, 473-474, 476-478, 482-487, 490-491, 493-494, 497-501, 522-526, 528-530, 542, 545-549, 551-560, 563-565, 585-586, 596-598, 600-610, 613, 619-622, 631-634, 636-637, 639-643, 645-646, 649-651, 655, 699, 701-709, 714-715, 729-731, 733-741, 744, 749, 752-754, 757, 765-766, 768-769, 788, 790-791, 819, 827-835, 840-842, 845, 847, 850, 852-853, 857, 859, 861, 866-872, 877-882, 884-887, 889-890, 893-894, 901, 923-931, 936-939, 975, 977, 981-986, 1019, 1023-1032, 1034, 1036-1041, 1083-1087, 1089, 1101, 1104-1105, 1107, 1109-1112, 1118-1123, 1131-1134, 1136, 1138-1144, 1151-1152, 1161-1163, 1187-1191, 1194-1195, 1197, 1199, 1200-1201, 1204, 1207, 1209, 1214-1216, 1218, 1220-1223, 1239-1241, 1244, 1247, 1257-1259, 1262-1270, 1273-1275, 1277-1278, 1314-1315, or 1343.

18. The antisense oligonucleotide of any one of claims 1-6, wherein the antisense oligonucleotide comprises the nucleobase sequence of any one of SEQ ID NOs: 122, 123, 125-126, 129-130, 131, 137, 146-147, 153-156, 158, 188-191, 211, 216, 223, 226, 235, 237, 245, 248, 270-271, 276, 278-279, 286, 289-293, 297-298, 310, 312-320, 323-328, 332, 334-335, 337, 385-386, 397-402, 407, 410-412, 415-417, 419-420, 476, 478, 482-487, 490-491, 493-494, 497-501, 522-523, 525-526, 528-530, 546-548, 557, 563-565, 586, 603, 605-610, 613, 619-622, 631-632, 634, 639-641, 645-646, 650-651, 655, 699, 701, 704-709, 714, 729-731, 733-734, 736-740, 744, 749, 752-754, 757, 765-766, 768-769, 788, 790-791, 819, 827-835, 840-842, 847, 850, 859, 861, 866-872, 877-882, 884-887, 889-890, 893-894, 901, 928-931, 936-939, 977, 981-986, 1019, 1024-1026, 1034, 1036-1041, 1083-1085, 1087, 1111, 1132-1134, 1136, 1138-1140, 1142, 1161-1163, 1188-1190, 1194-1195, 1207, 1218, 1241, 1244, 1247, 1257-1259, 1262-1269, 1277-1278, or 1314-1315.

19. The antisense oligonucleotide of any one of claims 1-6, wherein the antisense oligonucleotide comprises the nucleobase sequence of any one of SEQ ID NOs: 291-293, 313, 316-317, 325-326, 334-335, 415, 483, 485-486, 499-500, 523, 525, 564, 607, 622, 704-705, 707-709, 739, 752, 768-769, 788, 827, 861, 871-872, 877-879, 882, 885, 886, 901, 986, 1038, 1263, or 1265-1267.

20. The antisense oligonucleotide of any one of claims 1-6, wherein the antisense oligonucleotide comprises the nucleobase sequence of any one of SEQ ID NOs: 117, 215-226, 229-232, 287-293, 384-385, 387-388, 458, 484, 596-610, 850, 936-938, 981-986, 1083-1086, 1109-1112, or 1121-1123.

21. The antisense oligonucleotide of any one of claims 1-6, wherein the nucleobase sequence of the antisense oligonucleotide consists of any one of SEQ ID NOs: 6-1393.

22. The antisense oligonucleotide of any one of claims 1-6, wherein the antisense oligonucleotide consists of the nucleobase sequence of any one of SEQ ID NOs: 81-87, 90, 99-101, 106-107, 111, 113-114, 117, 122-126, 129-131, 137-138, 140, 144, 146-160, 172, 188-191, 211, 215-220, 22-226, 229, 231-239, 242-249, 270-271, 274-279, 286-293, 295-297, 298, 310-320, 322-328, 332-335, 337, 345, 383-388, 397-402, 405-413, 415-421, 458, 473-474, 476-478, 482-487, 490-491, 493-494, 497-501, 522-526, 528-530, 542, 545-549, 551-560, 563-565, 585-586, 596-598, 600-610, 613, 619-622, 631-634, 636-637, 639-643, 645-646, 649-651, 655, 699, 701-709, 714-715, 729-731, 733-741, 744, 749, 752-754, 757, 765-766, 768-769, 788, 790-791, 819, 827-835, 840-842, 845, 847, 850, 852-853, 857, 859, 861, 866-872, 877-882, 884-887, 889-890, 893-894, 901, 923-931, 936-939, 975, 977, 981-986, 1019, 1023-1032, 1034, 1036-1041, 1083-1087, 1089, 1101, 1104-1105, 1107, 1109-1112, 118-1123, 1131-1134, 1136, 1138-1144, 1151-1152, 1161-1163, 1187-1192, 1194-1195, 1197, 1199-1201, 1204, 1207, 1209, 1214-1216, 1218, 1220-1222, 1223, 1239-1241, 1244, 1247, 1257-1259, 1262-1270, 1273-1275, 1277-1278, 1314-1315, or 1343.

23. The antisense oligonucleotide of any one of claims 1-6, wherein the antisense oligonucleotide consists of the nucleobase sequence of any one of SEQ ID NOs: 81-84, 86-87, 99-101, 106, 113-114, 122-126, 129-131, 137-138, 140, 144, 146-159, 172, 188-191, 211, 215-217, 219, 223-226, 229, 232-239, 242-249, 270-271, 274-279, 286-293, 295-298, 310-320, 322-328, 332-335, 337, 345, 384-388, 397-402, 405-413, 415-421, 458, 473-474, 476-478, 482-487, 490-491, 493-494, 497-501, 522-526, 528-530, 542, 545-549, 551-560, 563-565, 585-586, 596-598, 600-610, 613, 619-622, 631-634, 636-637, 639-643, 645-646, 649-651, 655, 699, 701-709, 714-715, 729-731, 733-741, 744, 749, 752-754, 757, 765-766, 768-769, 788, 790-791, 819, 827-835, 840-842, 845, 847, 850, 852-853, 857, 859, 861, 866-872, 877-882, 884-887, 889-890, 893-894, 901, 923-931, 936-939, 975, 977, 981-986, 1019, 1023-1032, 1034, 1036-1041, 1083-1087, 1089, 1101, 1104-1105, 1107, 1109-1112, 1118-1123, 1131-1134, 1136, 1138-1144, 1151-1152, 1161-1163, 1187-1191, 1194-1195, 1197, 1199-1201, 1204, 1207, 1209, 1214-1216, 1218, 1220-1223, 1239-1241, 1244, 1247, 1257-1259, 1262-1270, 1273-1275, 1277-1278, 1314-1315, or 1343.

24. The antisense oligonucleotide of any one of claims 1-6, wherein the antisense oligonucleotide consists of the nucleobase sequence of any one of SEQ ID NOs: 81-84, 86-87, 99-101, 106, 113-114, 122-126, 129-131, 137-138, 140, 144, 146-151, 153-159, 172, 188-191, 211, 215-217, 219223-226, 229, 232-239, 242-245, 248-249, 270-271, 274-276, 278-279, 286-293, 295-298, 310-320, 322-328, 332-335, 337, 345, 384-388, 397-402, 405-413, 415-421, 458, 473-474, 476-478, 482-487, 490-491, 493-494, 497-501, 522-525, 526, 528-530, 542, 545-549, 551-560, 563-565, 585-586, 596-598, 600-610, 613, 619-622, 631-634, 636-637, 639-643, 645-646, 649-651, 655, 699, 701-709, 714-715, 729-731, 733-741, 744, 749, 752-754, 757, 765-766, 768-769, 788, 790-791, 819, 827-835, 840-842, 845, 847, 850, 852-853, 857, 859, 861, 866-872, 877-882, 884-887, 889-890, 893-894, 901, 923-931, 936-939, 975, 977, 981-986, 1019, 1023-1032, 1034, 1036-1041, 1083-1087, 1089, 1101, 1104-1105, 1107, 1109-1112, 1118-1123, 1131-1134, 1136, 1138-1144, 1151-1152, 1161-1163, 1187-1191, 1194-1195, 1197, 1199-1201, 1204, 1207, 1209, 1214-1216, 1218, 1220-1223, 1239-1241, 1244, 1247, 1257-1259, 1262-1270, 1273-1275, 1277-1278, 1314-1315, or 1343.

25. The antisense oligonucleotide of any one of claims 1-6, wherein the antisense oligonucleotide consists of the nucleobase sequence of any one of SEQ ID NOs: 122-123, 125-126, 129-131, 137, 146-147, 153-156, 158, 188-191, 211, 216, 223, 226, 235, 237, 245, 248, 270-271, 276, 278-279, 286, 289-293, 297-298, 310, 312-320, 323-328, 332, 334-335, 337, 385-386, 397-402, 407, 410-412, 415-417, 419-420, 476, 478, 482-487, 490-491, 493-494, 497-501, 522-523, 525-526, 528-530, 546-548, 557, 563-565, 586, 603, 605-610, 613, 619-622, 631-632, 634, 639-641, 645-646, 650-651, 655, 699, 701, 704-709, 714, 729-731, 733-734, 736-740, 744, 749, 752-754, 757, 765-766, 768-769, 788, 790-791, 819, 827-835, 840-842, 847, 850, 859, 861, 866-867, 868-872, 877-882, 884-887, 889-890, 893-894, 901, 928-931, 936-939, 977, 981-986, 1019, 1024-1026, 1034, 1036-1041, 1083-1085, 1087, 1111, 1132-1134, 1136, 1138-1140, 1142, 1161-1163, 1188-1190, 1194-1195, 1207, 1218, 1241, 1244, 1247, 1257-1259, 1262-1269, 1277-1278, or 1314-1315.

26. The antisense oligonucleotide of any one of claims 1-6, wherein the antisense oligonucleotide consists of the nucleobase sequence of any one of SEQ ID NOs: 291-293, 313, 316-317, 325-326, 334-335, 415, 483, 485-486, 499-500, 523, 525, 564, 607, 622, 704-705, 707-709, 739, 752, 768-769, 788, 827, 861, 871-872, 877-879, 882, 885, 886, 901, 986, 1038, 1263, or 1265-1267.

27. The antisense oligonucleotide of any one of claims 1-6, wherein the antisense oligonucleotide consists of the nucleobase sequence of any one of SEQ ID NOs: 117, 215-226, 229-232, 287-293, 384-385, 387-388, 458-484, 596-610, 850, 936-938, 981-986, 1083-1086, 1109-1112 or 1121-1123.

28. The antisense oligonucleotide of any one of claims 1-27, wherein the antisense oligonucleotide exhibits at least 50% mRNA inhibition at a 20 nM oligonucleotide concentration when determined using a cell assay when compared with a control cell.

29. The antisense oligonucleotide of any one of claims 1-27, wherein the antisense oligonucleotide exhibits at least 60% mRNA inhibition at a 20 nM antisense oligonucleotide concentration when determined using a cell assay when compared with a control cell.

30. The antisense oligonucleotide of any one of claims 1-27, wherein the antisense oligonucleotide exhibits at least 70% mRNA inhibition at a 20 nM antisense oligonucleotide concentration when determined using a cell assay when compared with a control cell.

31. The antisense oligonucleotide of any one of claims 1-27, wherein the antisense oligonucleotide exhibits at least 85% mRNA inhibition at a 20 nM antisense oligonucleotide concentration when determined using a cell assay when compared with a control cell.

32. The antisense oligonucleotide of any one of claims 1-27, wherein the antisense oligonucleotide exhibits at least 50% mRNA inhibition at a 20 nM antisense oligonucleotide concentration when determined using a cell assay when compared with a control cell.

33. The antisense oligonucleotide of any one of claims 1-27, wherein the antisense oligonucleotide exhibits at least 60% mRNA inhibition at a 20 nM antisense oligonucleotide concentration when determined using a cell assay when compared with a control cell.

34. The antisense oligonucleotide of any one of claims 1-27, wherein the antisense oligonucleotide exhibits at least 70% mRNA inhibition at a 20 nM antisense oligonucleotide concentration when determined using a cell assay when compared with a control cell.

35. The antisense oligonucleotide of any one of claims 1-27, wherein the antisense oligonucleotide exhibits at least 85% mRNA inhibition at a 20 nM antisense oligonucleotide concentration when determined using a cell assay when compared with a control cell.

36. The antisense oligonucleotide of any one of claims 1-35, wherein the antisense oligonucleotide comprises at least one alternative internucleoside linkage.

37. The antisense oligonucleotide of claim 36, wherein the at least one alternative internucleoside linkage is a phosphorothioate internucleoside linkage.

38. The antisense oligonucleotide of claim 36, wherein the at least one alternative internucleoside linkage is a 2′-alkoxy internucleoside linkage.

39. The antisense oligonucleotide of claim 36, wherein the at least one alternative internucleoside linkage is an alkyl phosphate internucleoside linkage.

40. The antisense oligonucleotide of any one of claims 1-39, wherein the antisense oligonucleotide comprises at least one alternative nucleobase.

41. The antisense oligonucleotide of claim 40, wherein the alternative nucleobase is 5′-methylcytosine, pseudouridine, or 5-methoxyuridine.

42. The antisense oligonucleotide of any one of claims 1-41, wherein the antisense oligonucleotide comprises at least one alternative sugar moiety.

43. The antisense oligonucleotide of claim 42, wherein the alternative sugar moiety is 2′-OMe or a bicyclic nucleic acid.

44. The antisense oligonucleotide of any one of claims 1-43, wherein the antisense oligonucleotide further comprises a ligand conjugated to the 5′ end or the 3′ end of the antisense oligonucleotide through a monovalent or branched bivalent or trivalent linker.

45. The antisense oligonucleotide of any one of claims 1-44, wherein the antisense oligonucleotide comprises a region complementary to at least 17 contiguous nucleotides of a MLH1 gene.

46. The antisense oligonucleotide of any one of claims 1-44, wherein the antisense oligonucleotide comprises a region complementary to at least 19 contiguous nucleotides of a MLH1 gene.

47. The antisense oligonucleotide of any one of claims 1-44, wherein the antisense oligonucleotide comprises a region complementary to 19 to 23 contiguous nucleotides of a MLH1 gene.

48. The antisense oligonucleotide of any one of claims 1-44, wherein the antisense oligonucleotide comprises a region complementary to 19 contiguous nucleotides of a MLH1 gene.

49. The antisense oligonucleotide of any one of claims 1-44, wherein the antisense oligonucleotide comprises a region complementary to 20 contiguous nucleotides of a MLH1 gene.

50. The antisense oligonucleotide of any one of claims 1-44, wherein the antisense oligonucleotide is from about 15 to 25 nucleosides in length.

51. The antisense oligonucleotide of any one of claims 1-44, wherein the antisense oligonucleotide is 20 nucleosides in length.

52. A pharmaceutical composition comprising one or more of the antisense oligonucleotides of any one of claims 1-51 and a pharmaceutically acceptable carrier or excipient.

53. A composition comprising one or more of the antisense oligonucleotides of any one of claims 1-51 and a lipid nanoparticle, a polyplex nanoparticle, a lipoplex nanoparticle, ora liposome.

54. A method of inhibiting transcription of MLH1 in a cell, the method comprising contacting the cell with one or more of the antisense oligonucleotides of any one of claims 1-51, the pharmaceutical composition of claim 52, or the composition of claim 53 for a time sufficient to obtain degradation of an mRNA transcript of a MLH1 gene, inhibits expression of the MLH1 gene in the cell.

55. A method of treating, preventing, or delaying the progression a trinucleotide repeat expansion disorder in a subject in need thereof, the method comprising administering to the subject one or more of the antisense oligonucleotides of any one of claims 1-51, the pharmaceutical composition of claim 52, or the composition of claim 53.

56. A method of reducing the level and/or activity of MLH1 in a cell of a subject identified as having a trinucleotide repeat expansion disorder, the method comprising contacting the cell with one or more of the antisense oligonucleotides of any one of claims 1-51, the pharmaceutical composition of claim 52, or the composition of claim 53.

57. A method for inhibiting expression of an MLH1 gene in a cell comprising contacting the cell with one or more of the antisense oligonucleotides of any one of claims 1-51, the pharmaceutical composition of claim 52, or the composition of claim 53 and maintaining the cell for a time sufficient to obtain degradation of a mRNA transcript of an MLH1 gene, thereby inhibiting expression of the MLH1 gene in the cell.

58. A method of decreasing trinucleotide repeat expansion in a cell, the method comprising contacting the cell with one or more of the antisense oligonucleotides of any one of claims 1-51, the pharmaceutical composition of claim 52, or the composition of claim 53.

59. The method of claim 57 or 58, wherein the cell is in a subject.

60. The method of any one of claims 55, 56, and 59, wherein the subject is a human.

61. The method of any one of claims 55-59, wherein the cell is a cell of the central nervous system or a muscle cell.

62. The method of any one of claims 54, 55, and 59-61, wherein the subject is identified as having a trinucleotide repeat expansion disorder.

63. The method of any one of claims 55, 56, and 58-62, wherein the trinucleotide repeat expansion disorder is a polyglutamine disease.

64. The method of claim 63, wherein the polyglutamine disease is selected from the group consisting of dentatorubropallidoluysian atrophy, Huntington's disease, spinal and bulbar muscular atrophy, spinocerebellar ataxia type 1, spinocerebellar ataxia type 2, spinocerebellar ataxia type 3, spinocerebellar ataxia type 6, spinocerebellar ataxia type 7, spinocerebellar ataxia type 17, and Huntington's disease-like 2.

65. The method of any one of claims 55-62, wherein the trinucleotide repeat expansion disorder is a non-polyglutamine disease.

66. The method of claim 67, wherein the non-polyglutamine disease is selected from the group consisting of fragile X syndrome, fragile X-associated tremor/ataxia syndrome, fragile XE mental retardation, Friedreich's ataxia, myotonic dystrophy type 1, spinocerebellar ataxia type 8, spinocerebellar ataxia type 12, oculopharyngeal muscular dystrophy, Fragile X-associated premature ovarian failure, FRA2A syndrome, FRA7A syndrome, and early infantile epileptic encephalopathy.

67. One or more antisense oligonucleotides of any one of claims 1-51, the pharmaceutical composition of claim 52, or the composition of claim 53 for use in the prevention or treatment of a trinucleotide repeat expansion disorder.

68. The antisense oligonucleotide, pharmaceutical composition, or composition for the use of claim 69, wherein the trinucleotide repeat expansion disorder is selected from the group consisting of dentatorubropallidoluysian atrophy, Huntington's disease, spinal and bulbar muscular atrophy, spinocerebellar ataxia type 1, spinocerebellar ataxia type 2, spinocerebellar ataxia type 3, spinocerebellar ataxia type 6, spinocerebellar ataxia type 7, spinocerebellar ataxia type 17, Huntington's disease-like 2, fragile X syndrome, fragile X-associated tremor/ataxia syndrome, fragile XE mental retardation, Friedreich's ataxia, myotonic dystrophy type 1, spinocerebellar ataxia type 8, spinocerebellar ataxia type 12, oculopharyngeal muscular dystrophy, Fragile X-associated premature ovarian failure, FRA2A syndrome, FRA7A syndrome, and early infantile epileptic encephalopathy.

69. The antisense oligonucleotide, pharmaceutical composition, or composition for the use of claim 67 or 68, wherein the trinucleotide repeat expansion disorder is Huntington's disease.

70. The antisense oligonucleotide, pharmaceutical composition, or composition for the use of claim 67 or 68, wherein the trinucleotide repeat expansion disorder is Friedreich's ataxia.

71. The antisense oligonucleotide, pharmaceutical composition, or composition for the use of claim 67 or 68, wherein the trinucleotide repeat expansion disorder is myotonic dystrophy type 1.

72. The antisense oligonucleotide, pharmaceutical composition, or composition for the use of any of claims 67-71, wherein the antisense oligonucleotide, pharmaceutical composition, or composition is administered intrathecally.

73. The antisense oligonucleotide, pharmaceutical composition, or composition for the use of any of claims 67-71, wherein the antisense oligonucleotide, pharmaceutical composition, or composition is administered intraventricularly.

74. The antisense oligonucleotide, pharmaceutical composition, or composition for use of any of claims 67-71, wherein the antisense oligonucleotide, pharmaceutical composition, or composition is administered intramuscularly.

75. A method of treating, preventing, or delaying the progression a disorder in a subject in need thereof wherein the subject is suffering from trinucleotide repeat expansion disorder, comprising administering to said subject one or more of the antisense oligonucleotides of any one of claims 1-51, the pharmaceutical composition of claim 52, or the composition of claim 53.

76. The method of claim 75, further comprising administering an additional therapeutic agent.

77. The method of claim 76, wherein the additional therapeutic agent is an oligonucleotide that hybridizes to an mRNA encoding the Huntingtin gene.

78. A method of preventing or delaying the progression of a trinucleotide repeat expansion disorder in a subject, the method comprising administering to the subject one or more of the antisense oligonucleotides of any one of claims 1-51, the pharmaceutical composition of claim 52, or the composition of claim 53 in an amount effective to delay progression of a trinucleotide repeat expansion disorder of the subject.

79. The method of claim 78, wherein the trinucleotide repeat expansion disorder is selected from the group consisting of dentatorubropallidoluysian atrophy, Huntington's disease, spinal and bulbar muscular atrophy, spinocerebellar ataxia type 1, spinocerebellar ataxia type 2, spinocerebellar ataxia type 3, spinocerebellar ataxia type 6, spinocerebellar ataxia type 7, spinocerebellar ataxia type 17, Huntington's disease-like 2, fragile X syndrome, fragile X-associated tremor/ataxia syndrome, fragile XE mental retardation, Friedreich's ataxia, myotonic dystrophy type 1, spinocerebellar ataxia type 8, spinocerebellar ataxia type 12, oculopharyngeal muscular dystrophy, Fragile X-associated premature ovarian failure, FRA2A syndrome, FRA7A syndrome, and early infantile epileptic encephalopathy.

80. The method of claim 78 or 79, wherein the trinucleotide repeat expansion disorder is Huntington's disease.

81. The method of claim 78 or 79, wherein the trinucleotide repeat expansion disorder is Friedrich's ataxia.

82. The method of claim 78 or 79, wherein the trinucleotide repeat expansion disorder is myotonic dystrophy type 1.

83. The method of claim 78 or 79, further comprising administering an additional therapeutic agent.

84. The method of claim 83, wherein the additional therapeutic agent is an oligonucleotide that hybridizes to an mRNA encoding the Huntington gene.

85. The method of any of claims 78-84, wherein progression of the trinucleotide repeat expansion disorder is delayed by at least 120 days, for example, at least 6 months, at least 12 months, at least 2 years, at least 3 years, at least 4 years, at least 5 years, at least 10 years or more, when compared with a predicted progression.

86. One or more antisense oligonucleotides of any one of claims 1-51, the pharmaceutical composition of claim 52, or the composition of claim 53, for use in preventing or delaying progression of a trinucleotide repeat expansion disorder in a subject.

87. The antisense oligonucleotide, pharmaceutical composition, or composition for the use of claim 86, wherein the trinucleotide repeat expansion disorder is selected from the group consisting of dentatorubropallidoluysian atrophy, Huntington's disease, spinal and bulbar muscular atrophy, spinocerebellar ataxia type 1, spinocerebellar ataxia type 2, spinocerebellar ataxia type 3, spinocerebellar ataxia type 6, spinocerebellar ataxia type 7, spinocerebellar ataxia type 17, Huntington's disease-like 2, fragile X syndrome, fragile X-associated tremor/ataxia syndrome, fragile XE mental retardation, Friedreich's ataxia, myotonic dystrophy type 1, spinocerebellar ataxia type 8, spinocerebellar ataxia type 12, oculopharyngeal muscular dystrophy, Fragile X-associated premature ovarian failure, FRA2A syndrome, FRA7A syndrome, and early infantile epileptic encephalopathy.

88. The antisense oligonucleotide, pharmaceutical composition, or composition for the use of claim 86 or 87, wherein the trinucleotide repeat expansion disorder is Huntington's disease.

89. The antisense oligonucleotide, pharmaceutical composition, or composition for the use of claim 86 or 87, wherein the trinucleotide repeat expansion disorder is Friedrich's ataxia.

90. The antisense oligonucleotide, pharmaceutical composition, or composition for the use of claim 88 or 89, wherein the trinucleotide repeat expansion disorder is Myotonic Dystrophy type 1.

91. The antisense oligonucleotide, pharmaceutical composition, or composition for the use of any one of claims 86-90, wherein progression of the trinucleotide repeat expansion disorder is delayed by at least 120 days, for example, at least 6 months, at least 12 months, at least 2 years, at least 3 years, at least 4 years, at least 5 years, at least 10 years or more, when compared with a predicted progression.

92. A double-stranded ribonucleic acid (dsRNA), wherein the dsRNA comprises a sense strand and an antisense strand, wherein the antisense strand is complementary to at least 15 contiguous nucleobases of an MLH1 gene, and wherein the dsRNA comprises a duplex structure of between 15 and 30 linked nucleosides in length.

93. A dsRNA for reducing expression of MLH1 in a cell, wherein the dsRNA comprises a sense strand and an antisense strand, wherein the antisense strand is complementary to at least 15 contiguous nucleobases of an MLH1 gene, and wherein the dsRNA comprises a duplex structure of between 15 and 30 linked nucleosides in length.

94. The dsRNA of claim 92 or 93 comprising a duplex structure of between 19 and 23 linked nucleosides in length.

95. The dsRNA of any one of claims 92-94, further comprising a loop region joining the sense strand and antisense strand, wherein the loop region is characterized by a lack of base pairing between nucleobases within the loop region.

96. The dsRNA of any one of claims 92-95, wherein the region the sense or antisense strand is complementary to is at least 15 contiguous nucleotides of an MLH1 gene corresponding to reference mRNA NM_000249.3 at one or more of positions 153-176, 267-388, 417-545, 792-995, 1639-1727, 1849-1900, 2105-2207, 2337-2387, 2426-2479 and 2508-2600 of the MLH1 gene.

97. The dsRNA of any one of claims 92-95, wherein the region the sense or antisense strand is complementary to is at least 15 contiguous nucleotides of an MLH1 gene corresponding to reference mRNA NM_000249.3 at one or more of positions 326-388, 459-511, 805-878, 903-926, 1639-1720, and 2141-2192 of the MLH1 gene.

98. The dsRNA of any one of claims 92-95, wherein the region the sense or antisense strand is complementary to is at least 15 contiguous nucleotides of an MLH1 gene corresponding to reference mRNA NM_000249.3 at one or more of positions 267-388, 417-545, 805-878, 903-995, 1639-1727, 1849-1900, 2141-2207, 2337-2387, and 2426-2479 of the MLH1 gene.

99. The dsRNA of any one of claims 92-95, wherein the region the sense or antisense strand is complementary to is at least 15 contiguous nucleotides of an MLH1 gene corresponding to reference mRNA NM_000249.3 at one or more of positions 153-176, 267-388, 417-545, 792-995, 1639-1727, 1849-1900, 2105-2207, 2337-2387, and 2426-2479 of the MLH1 gene.

100. The dsRNA of any one of claims 92-95, wherein the region the sense or antisense strand is complementary to is at least 15 contiguous nucleotides of an MLH1 gene corresponding to reference mRNA NM_000249.3 at one or more of positions 332-355, 459-545, 836-859, 1849-1900, 2141-2164, and 2426-2449 of the MLH1 gene.

101. The dsRNA of any one of claims 92-95, wherein the region the sense or antisense strand is complementary to is at least 15 contiguous nucleotides of an MLH1 gene corresponding to reference mRNA NM_000249.3 at one or more of positions 267-388, 417-545, 805-995, 1639-1722, 1849-1900, 2105-2207, 2337-2387, 2426-2479, and 2508-2600 of the MLH1 gene.

102. The dsRNA of any one of claims 92-95, wherein the antisense strand comprises an antisense nucleobase sequence selected from a list in Table 4, and the sense strand comprises a sense nucleobase sequence complementary to the antisense nucleobase sequence.

103. The dsRNA of any one of claims 92-95, wherein the antisense nucleobase sequence consists of an antisense strand in Table 4, wherein the 5′ nucleotide represented by U can be any nucleotide (e.g., U, A, C, G), and the sense nucleobase sequence consists of a sequence complementary to the antisense nucleobase sequence.

104. The dsRNA of any one of claims 92-95, wherein the sense strand comprises a sense nucleobase sequence selected from a list in Table 4, and the antisense strand comprises an antisense nucleobase sequence complementary to the sense nucleobase sequence.

105. The dsRNA of any one of claims 92-95, wherein the sense nucleobase sequence consists of a sense sequence in Table 4, and the antisense nucleobase sequence consists of a sequence complementary to the sense nucleobase sequence.

106. The dsRNA of any one of claims 92-95, wherein the sense strand comprises a sense nucleobase sequence selected from any one of the lists in Tables 5-11, and the antisense strand comprises an antisense nucleobase sequence complementary to the sense nucleobase sequence.

107. The dsRNA of any one of claims 92-95, wherein the sense nucleobase sequence consists of a sense sequence in any one of Tables 5-11, and the antisense nucleobase sequence consists of a sequence complementary to the sense nucleobase sequence.

108. The dsRNA of any one of claims 92-95, wherein the antisense strand comprises an antisense nucleobase sequence selected from a list in Table 13, wherein the 5′ nucleotide represented by U of the antisense oligonucleotide is any nucleotide (e.g., U, A, G, C, T), and the sense strand comprises a sense nucleobase sequence complementary to the antisense nucleobase sequence.

109. The dsRNA of any one of claims 92-95, wherein the antisense nucleobase sequence consists of an antisense sequence in Table 13, wherein the 5′ nucleotide represented by U of the antisense oligonucleotide is any nucleotide (e.g., U, A, G, C, T), and the sense nucleobase sequence consists of a sequence complementary to the antisense nucleobase sequence.

110. The dsRNA of any one of claims 92-95, wherein the sense strand comprises a sense nucleobase sequence selected from a list in Table 13, and the antisense strand comprises an antisense nucleobase sequence complementary to the sense nucleobase sequence.

111. The dsRNA of any one of claims 92-95, wherein the sense nucleobase sequence consists of a sense sequence in Table 13, and the antisense nucleobase sequence consists of a sequence complementary to the sense nucleobase sequence.

112. The dsRNA of any one of claims 1-111 wherein the dsRNA comprises at least one alternative nucleobase, at least one alternative internucleoside linkage, and/or at least one alternative sugar moiety.

113. The dsRNA of claim 112, wherein the at least one alternative internucleoside linkage is a phosphorothioate internucleoside linkage.

114. The dsRNA of claim 112, wherein the at least one alternative internucleoside linkage is a 2′-alkoxy internucleoside linkage.

115. The dsRNA of claim 112, wherein the at least one alternative internucleoside linkage is an alkyl phosphate internucleoside linkage.

116. The dsRNA of claim 112, wherein the at least one alternative nucleobase is 5′-methylcytosine, pseudouridine, or 5-methoxyuridine.

117. The dsRNA of claim 112, wherein the alternative sugar moiety is 2′-OMe or a bicyclic nucleic acid.

118. The dsRNA of claim 112, wherein the dsRNA comprises at least one 2′-OMe sugar moiety and at least one phosphorothioate internucleoside linkage.

119. The dsRNA of any one of claims 92-118, wherein the dsRNA further comprises a ligand conjugated to the 3′ end of the sense strand through a monovalent or branched bivalent or trivalent linker.

120. The dsRNA of any one of claims 92-118, wherein the sense strand comprises a nucleobase sequence of any one of SEQ ID NOs: 1486, 1492, 1494, 1496, 1536, 1544, 1546, 1560, 1562, 1564, 1584, 1598, 1604, 1608, 1622, 1624, 1630, 1660, 1710, 1720, 1722, 1726, 1728, 1732, 1734, 1736, 1748, 1752, 1756, 1758, 1762, 1764, 1772, 1954, 1960, 1966, 1972, 1974, 1976, 1998, 2008, 2012, 2024, 2034, 2038, 2052, 2054, 2080, 2086, 2114, 2116, 2120, 2122, 2158, 2162, 2176, 2178, 2570, 2588, 2598, 2604, 2608, 2612, 2616, 2618, 2622, 2628, 2720, 2744, 2746, 2748, 2752, 2894, 2898, 2902, 2906, 2916, 2922, 2924, 2928, 2936, 2938, 2940, 2944, 2948, 2966, 3064, 3066, 3084, 3088, 3120, 3122, 3124, 3130, 3134, 3136, 3148, 3164, 3210, 3212, 3216, 3248, 3272, 3274, 3276, 3278, and 3288.

121. The dsRNA of any one of claims 92-118, wherein the sense strand comprises a nucleobase sequence of any one of SEQ ID NOs: 1584, 1598, 1604, 1608, 1622, 1624, 1630, 1710, 1720, 1722, 1726, 1728, 1732, 1734, 1736, 1748, 1752, 1756, 1758, 1762, 1954, 1960, 1966, 1972, 1974, 1976, 1998, 2008, 2012, 2024, 2034, 2038, 2052, 2054, 2080, 2086, 2570, 2588, 2598, 2604, 2608, 2612, 2616, 2618, 2622, 2628, 2916, 2922, 2924, 2928, 2936, 2938, 2940, 2944, 2948, and 2966.

122. The dsRNA of any one of claims 92-118, wherein the sense strand comprises a nucleobase sequence of any one of SEQ ID NOs: 1536, 1544, 1546, 1560, 1562, 1564, 1584, 1598, 1604, 1608, 1622, 1624, 1630, 1660, 1710, 1720, 1722, 1726, 1728, 1732, 1734, 1736, 1748, 1752, 1756, 1758, 1762, 1764, 1772, 1954, 1960, 1966, 1972, 1974, 1976, 1998, 2008, 2012, 2024, 2034, 2038, 2052, 2054, 2080, 2086, 2114, 2116, 2120, 2122, 2158, 2162, 2176, 2178, 2570, 2588, 2598, 2604, 2608, 2612, 2616, 2618, 2622, 2628, 2720, 2744, 2746, 2748, 2752, 2916, 2922, 2924, 2928, 2936, 2938, 2940, 2944, 2948, 2966, 3064, 3066, 3084, 3088, 3120, 3122, 3124, 3130, 3134, 3136, 3148, and 3164.

123. The dsRNA of any one of claims 92-118, wherein the sense strand comprises a nucleobase sequence of any one of SEQ ID NOs: 1486, 1492, 1494, 1496, 1536, 1544, 1546, 1560, 1562, 1564, 1584, 1598, 1604, 1608, 1622, 1624, 1630, 1660, 1710, 1720, 1722, 1726, 1728, 1732, 1734, 1736, 1748, 1752, 1756, 1758, 1762, 1764, 1772, 1954, 1960, 1966, 1972, 1974, 1976, 1998, 2008, 2012, 2024, 2034, 2038, 2052, 2054, 2080, 2086, 2114, 2116, 2120, 2122, 2158, 2162, 2176, 2178, 2570, 2588, 2598, 2604, 2608, 2612, 2616, 2618, 2622, 2628, 2720, 2744, 2746, 2748, 2752, 2894, 2898, 2902, 2906, 2916, 2922, 2924, 2928, 2936, 2938, 2940, 2944, 2948, 2966, 3064, 3066, 3084, 3088, 3120, 3122, 3124, 3130, 3134, 3136, 3148, and 3164.

124. The dsRNA of any one of claims 92-118, wherein the sense strand comprises a nucleobase sequence of any one of SEQ ID NOs: 1584, 1598, 1604, 1608, 1710, 1720, 1722, 1726, 1728, 1732, 1734, 1736, 1748, 1752, 1756, 1758, 1762, 1764, 1772, 1998, 2008, 2012, 2024, 2720, 2744, 2746, 2748, 2752, 2916, 2922, 2924, 2928, 2936, 2938, 2940, 2944, 3120, 3122, 3124, 3130, 3134, 3136, and 3148.

125. The dsRNA of any one of claims 92-118, wherein the sense strand comprises a nucleobase sequence of any one of SEQ ID NOs: 1536, 1544, 1546, 1560, 1562, 1564, 1584, 1598, 1604, 1608, 1622, 1624, 1630, 1660, 1710, 1720, 1722, 1726, 1728, 1732, 1734, 1736, 1748, 1752, 1756, 1758, 1762, 1764, 1772, 1954, 1960, 1966, 1972, 1974, 1976, 1998, 2008, 2012, 2024, 2034, 2038, 2052, 2054, 2080, 2086, 2114, 2116, 2120, 2122, 2158, 2162, 2176, 2178, 2570, 2588, 2598, 2604, 2608, 2612, 2616, 2618, 2622, 2628, 2720, 2744, 2746, 2748, 2752, 2894, 2898, 2902, 2906, 2916, 2922, 2924, 2928, 2936, 2938, 2940, 2944, 2948, 2966, 3064, 3066, 3084, 3088, 3120, 3122, 3124, 3130, 3134, 3136, 3148, 3164, 3210, 3212, 3216, 3248, 3272, 3274, 3276, 3278, and 3288.

126. The dsRNA of any one of claims 92-118, wherein the antisense strand comprises a nucleobase sequence of any one of SEQ ID NOs: 1487, 1493, 1495, 1497, 1537, 1545, 1547, 1561, 1563, 1565, 1585, 1599, 1605, 1609, 1623, 1625, 1631, 1661, 1711, 1721, 1723, 1727, 1729, 1733, 1735, 1737, 1749, 1753, 1757, 1759, 1763, 1765, 1773, 1955, 1961, 1967, 1973, 1975, 1977, 1999, 2009, 2013, 2025, 2035, 2039, 2053, 2055, 2081, 2087, 2115, 2117, 2121, 2123, 2159, 2163, 2177, 2179, 2571, 2589, 2599, 2605, 2609, 2613, 2617, 2619, 2623, 2629, 2721, 2745, 2747, 2749, 2753, 2895, 2899, 2903, 2907, 2917, 2923, 2925, 2929, 2937, 2939, 2941, 2945, 2949, 2967, 3065, 3067, 3085, 3089, 3121, 3123, 3125, 3131, 3135, 3137, 3149, 3165, 3211, 3213, 3217, 3249, 3273, 3275, 3277, 3279, and 3289, wherein the 5′ nucleotide represented by U of the antisense oligonucleotide is any nucleotide (e.g., U, A, G, C, T).

127. The dsRNA of any one of claims 92-118, wherein the antisense strand comprises a nucleobase sequence of any one of SEQ ID NOs: 1585, 1599, 1605, 1609, 1623, 1625, 1631, 1711, 1721, 1723, 1727, 1729, 1733, 1735, 1737, 1749, 1753, 1757, 1759, 1763, 1955, 1961, 1967, 1973, 1975, 1977, 1999, 2009, 2013, 2025, 2035, 2039, 2053, 2055, 2081, 2087, 2571, 2589, 2599, 2605, 2609, 2613, 2617, 2619, 2623, 2629, 2917, 2923, 2925, 2929, 2937, 2939, 2941, 2945, 2949, and 2967, wherein the 5′ nucleotide represented by U of the antisense oligonucleotide is any nucleotide (e.g., U, A, G, C, T).

128. The dsRNA of any one of claims 92-118, wherein the antisense strand comprises a nucleobase sequence of any one of SEQ ID NOs: 1537, 1545, 1547, 1561, 1563, 1565, 1585, 1599, 1605, 1609, 1623, 1625, 1631, 1661, 1711, 1721, 1723, 1727, 1729, 1733, 1735, 1737, 1749, 1753, 1757, 1759, 1763, 1765, 1773, 1955, 1961, 1967, 1973, 1975, 1977, 1999, 2009, 2013, 2025, 2035, 2039, 2053, 2055, 2081, 2087, 2115, 2117, 2121, 2123, 2159, 2163, 2177, 2179, 2571, 2589, 2599, 2605, 2609, 2613, 2617, 2619, 2623, 2629, 2721, 2745, 2747, 2749, 2753, 2917, 2923, 2925, 2929, 2937, 2939, 2941, 2945, 2949, 2967, 3065, 3067, 3085, 3089, 3121, 3123, 3125, 3131, 3135, 3137, 3149, and 3165, wherein the 5′ nucleotide represented by U of the antisense oligonucleotide is any nucleotide (e.g., U, A, G, C, T).

129. The dsRNA of any one of claims 92-118, wherein the antisense strand comprises a nucleobase sequence of any one of SEQ ID NOs: 1487, 1493, 1495, 1497, 1537, 1545, 1547, 1561, 1563, 1565, 1585, 1599, 1605, 1609, 1623, 1625, 1631, 1661, 1711, 1721, 1723, 1727, 1729, 1733, 1735, 1737, 1749, 1753, 1757, 1759, 1763, 1765, 1773, 1955, 1961, 1967, 1973, 1975, 1977, 1999, 2009, 2013, 2025, 2035, 2039, 2053, 2055, 2081, 2087, 2115, 2117, 2121, 2123, 2159, 2163, 2177, 2179, 2571, 2589, 2599, 2605, 2609, 2613, 2617, 2619, 2623, 2629, 2721, 2745, 2747, 2749, 2753, 2895, 2899, 2903, 2907, 2917, 2923, 2925, 2929, 2937, 2939, 2941, 2945, 2949, 2967, 3065, 3067, 3085, 3089, 3121, 3123, 3125, 3131, 3135, 3137, 3149, and 3165, wherein the 5′ nucleotide represented by U of the antisense oligonucleotide is any nucleotide (e.g., U, A, G, C, T).

130. The dsRNA of any one of claims 92-118, wherein the antisense strand comprises a nucleobase sequence of any one of SEQ ID NOs: 1585, 1599, 1605, 1609, 1711, 1721, 1723, 1727, 1729, 1733, 1735, 1737, 1749, 1753, 1757, 1759, 1763, 1765, 1773, 1999, 2009, 2013, 2025, 2721, 2745, 2747, 2749, 2753, 2917, 2923, 2925, 2929, 2937, 2939, 2941, 2945, 3121, 3123, 3125, 3131, 3135, 3137, and 3149, wherein the 5′ nucleotide represented by U of the antisense oligonucleotide is any nucleotide (e.g., U, A, G, C, T).

131. The dsRNA of any one of claims 92-118, wherein the antisense strand comprises a nucleobase sequence of any one of SEQ ID NOs: 1537, 1545, 1547, 1561, 1563, 1565, 1585, 1599, 1605, 1609, 1623, 1625, 1631, 1661, 1711, 1721, 1723, 1727, 1729, 1733, 1735, 1737, 1749, 1753, 1757, 1759, 1763, 1765, 1773, 1955, 1961, 1967, 1973, 1975, 1977, 1999, 2009, 2013, 2025, 2035, 2039, 2053, 2055, 2081, 2087, 2115, 2117, 2121, 2123, 2159, 2163, 2177, 2179, 2571, 2589, 2599, 2605, 2609, 2613, 2617, 2619, 2623, 2629, 2721, 2745, 2747, 2749, 2753, 2895, 2899, 2903, 2907, 2917, 2923, 2925, 2929, 2937, 2939, 2941, 2945, 2949, 2967, 3065, 3067, 3085, 3089, 3121, 3123, 3125, 3131, 3135, 3137, 3149, 3165, 3211, 3213, 3217, 3249, 3273, 3275, 3277, 3279, and 3289, wherein the 5′ nucleotide represented by U of the antisense oligonucleotide is any nucleotide (e.g., U, A, G, C, T).

132. The dsRNA of any one of claims 92-118, wherein the sense strand consists of a nucleobase sequence of any one of SEQ ID NOs: 1486, 1492, 1494, 1496, 1536, 1544, 1546, 1560, 1562, 1564, 1584, 1598, 1604, 1608, 1622, 1624, 1630, 1660, 1710, 1720, 1722, 1726, 1728, 1732, 1734, 1736, 1748, 1752, 1756, 1758, 1762, 1764, 1772, 1954, 1960, 1966, 1972, 1974, 1976, 1998, 2008, 2012, 2024, 2034, 2038, 2052, 2054, 2080, 2086, 2114, 2116, 2120, 2122, 2158, 2162, 2176, 2178, 2570, 2588, 2598, 2604, 2608, 2612, 2616, 2618, 2622, 2628, 2720, 2744, 2746, 2748, 2752, 2894, 2898, 2902, 2906, 2916, 2922, 2924, 2928, 2936, 2938, 2940, 2944, 2948, 2966, 3064, 3066, 3084, 3088, 3120, 3122, 3124, 3130, 3134, 3136, 3148, 3164, 3210, 3212, 3216, 3248, 3272, 3274, 3276, 3278, and 3288.

133. The dsRNA of any one of claims 92-118, wherein the sense strand consists of a nucleobase sequence of any one of SEQ ID NOs: 1584, 1598, 1604, 1608, 1622, 1624, 1630, 1710, 1720, 1722, 1726, 1728, 1732, 1734, 1736, 1748, 1752, 1756, 1758, 1762, 1954, 1960, 1966, 1972, 1974, 1976, 1998, 2008, 2012, 2024, 2034, 2038, 2052, 2054, 2080, 2086, 2570, 2588, 2598, 2604, 2608, 2612, 2616, 2618, 2622, 2628, 2916, 2922, 2924, 2928, 2936, 2938, 2940, 2944, 2948, and 2966.

134. The dsRNA of any one of claims 92-118, wherein the sense strand consists of a nucleobase sequence of any one of SEQ ID NOs: 1536, 1544, 1546, 1560, 1562, 1564, 1584, 1598, 1604, 1608, 1622, 1624, 1630, 1660, 1710, 1720, 1722, 1726, 1728, 1732, 1734, 1736, 1748, 1752, 1756, 1758, 1762, 1764, 1772, 1954, 1960, 1966, 1972, 1974, 1976, 1998, 2008, 2012, 2024, 2034, 2038, 2052, 2054, 2080, 2086, 2114, 2116, 2120, 2122, 2158, 2162, 2176, 2178, 2570, 2588, 2598, 2604, 2608, 2612, 2616, 2618, 2622, 2628, 2720, 2744, 2746, 2748, 2752, 2916, 2922, 2924, 2928, 2936, 2938, 2940, 2944, 2948, 2966, 3064, 3066, 3084, 3088, 3120, 3122, 3124, 3130, 3134, 3136, 3148, and 3164.

135. The dsRNA of any one of claims 92-118, wherein the sense strand consists of a nucleobase sequence of any one of SEQ ID NOs: 1486, 1492, 1494, 1496, 1536, 1544, 1546, 1560, 1562, 1564, 1584, 1598, 1604, 1608, 1622, 1624, 1630, 1660, 1710, 1720, 1722, 1726, 1728, 1732, 1734, 1736, 1748, 1752, 1756, 1758, 1762, 1764, 1772, 1954, 1960, 1966, 1972, 1974, 1976, 1998, 2008, 2012, 2024, 2034, 2038, 2052, 2054, 2080, 2086, 2114, 2116, 2120, 2122, 2158, 2162, 2176, 2178, 2570, 2588, 2598, 2604, 2608, 2612, 2616, 2618, 2622, 2628, 2720, 2744, 2746, 2748, 2752, 2894, 2898, 2902, 2906, 2916, 2922, 2924, 2928, 2936, 2938, 2940, 2944, 2948, 2966, 3064, 3066, 3084, 3088, 3120, 3122, 3124, 3130, 3134, 3136, 3148, and 3164.

136. The dsRNA of any one of claims 92-118, wherein the sense strand consists of a nucleobase sequence of any one of SEQ ID NOs: 1584, 1598, 1604, 1608, 1710, 1720, 1722, 1726, 1728, 1732, 1734, 1736, 1748, 1752, 1756, 1758, 1762, 1764, 1772, 1998, 2008, 2012, 2024, 2720, 2744, 2746, 2748, 2752, 2916, 2922, 2924, 2928, 2936, 2938, 2940, 2944, 3120, 3122, 3124, 3130, 3134, 3136, and 3148.

137. The dsRNA of any one of claims 92-118, wherein the sense strand consists of a nucleobase sequence of any one of SEQ ID NOs: 1536, 1544, 1546, 1560, 1562, 1564, 1584, 1598, 1604, 1608, 1622, 1624, 1630, 1660, 1710, 1720, 1722, 1726, 1728, 1732, 1734, 1736, 1748, 1752, 1756, 1758, 1762, 1764, 1772, 1954, 1960, 1966, 1972, 1974, 1976, 1998, 2008, 2012, 2024, 2034, 2038, 2052, 2054, 2080, 2086, 2114, 2116, 2120, 2122, 2158, 2162, 2176, 2178, 2570, 2588, 2598, 2604, 2608, 2612, 2616, 2618, 2622, 2628, 2720, 2744, 2746, 2748, 2752, 2894, 2898, 2902, 2906, 2916, 2922, 2924, 2928, 2936, 2938, 2940, 2944, 2948, 2966, 3064, 3066, 3084, 3088, 3120, 3122, 3124, 3130, 3134, 3136, 3148, 3164, 3210, 3212, 3216, 3248, 3272, 3274, 3276, 3278, and 3288.

138. The dsRNA of any one of claims 92-118, wherein the antisense strand consists of a nucleobase sequence of any one of SEQ ID NOs: 1487, 1493, 1495, 1497, 1537, 1545, 1547, 1561, 1563, 1565, 1585, 1599, 1605, 1609, 1623, 1625, 1631, 1661, 1711, 1721, 1723, 1727, 1729, 1733, 1735, 1737, 1749, 1753, 1757, 1759, 1763, 1765, 1773, 1955, 1961, 1967, 1973, 1975, 1977, 1999, 2009, 2013, 2025, 2035, 2039, 2053, 2055, 2081, 2087, 2115, 2117, 2121, 2123, 2159, 2163, 2177, 2179, 2571, 2589, 2599, 2605, 2609, 2613, 2617, 2619, 2623, 2629, 2721, 2745, 2747, 2749, 2753, 2895, 2899, 2903, 2907, 2917, 2923, 2925, 2929, 2937, 2939, 2941, 2945, 2949, 2967, 3065, 3067, 3085, 3089, 3121, 3123, 3125, 3131, 3135, 3137, 3149, 3165, 3211, 3213, 3217, 3249, 3273, 3275, 3277, 3279, and 3289, wherein the 5′ nucleotide represented by U of the antisense oligonucleotide is any nucleotide (e.g., U, A, G, C, T).

139. The dsRNA of any one of claims 92-118, wherein the antisense strand consists of a nucleobase sequence of any one of SEQ ID NOs: 1585, 1599, 1605, 1609, 1623, 1625, 1631, 1711, 1721, 1723, 1727, 1729, 1733, 1735, 1737, 1749, 1753, 1757, 1759, 1763, 1955, 1961, 1967, 1973, 1975, 1977, 1999, 2009, 2013, 2025, 2035, 2039, 2053, 2055, 2081, 2087, 2571, 2589, 2599, 2605, 2609, 2613, 2617, 2619, 2623, 2629, 2917, 2923, 2925, 2929, 2937, 2939, 2941, 2945, 2949, and 2967, wherein the 5′ nucleotide represented by U of the antisense oligonucleotide is any nucleotide (e.g., U, A, G, C, T).

140. The dsRNA of any one of claims 92-118, wherein the antisense strand consists of a nucleobase sequence of any one of SEQ ID NOs: 1537, 1545, 1547, 1561, 1563, 1565, 1585, 1599, 1605, 1609, 1623, 1625, 1631, 1661, 1711, 1721, 1723, 1727, 1729, 1733, 1735, 1737, 1749, 1753, 1757, 1759, 1763, 1765, 1773, 1955, 1961, 1967, 1973, 1975, 1977, 1999, 2009, 2013, 2025, 2035, 2039, 2053, 2055, 2081, 2087, 2115, 2117, 2121, 2123, 2159, 2163, 2177, 2179, 2571, 2589, 2599, 2605, 2609, 2613, 2617, 2619, 2623, 2629, 2721, 2745, 2747, 2749, 2753, 2917, 2923, 2925, 2929, 2937, 2939, 2941, 2945, 2949, 2967, 3065, 3067, 3085, 3089, 3121, 3123, 3125, 3131, 3135, 3137, 3149, and 3165, wherein the 5′ nucleotide represented by U of the antisense oligonucleotide is any nucleotide (e.g., U, A, G, C, T).

141. The dsRNA of any one of claims 92-118, wherein the antisense strand consists of a nucleobase sequence of any one of SEQ ID NOs: 1487, 1493, 1495, 1497, 1537, 1545, 1547, 1561, 1563, 1565, 1585, 1599, 1605, 1609, 1623, 1625, 1631, 1661, 1711, 1721, 1723, 1727, 1729, 1733, 1735, 1737, 1749, 1753, 1757, 1759, 1763, 1765, 1773, 1955, 1961, 1967, 1973, 1975, 1977, 1999, 2009, 2013, 2025, 2035, 2039, 2053, 2055, 2081, 2087, 2115, 2117, 2121, 2123, 2159, 2163, 2177, 2179, 2571, 2589, 2599, 2605, 2609, 2613, 2617, 2619, 2623, 2629, 2721, 2745, 2747, 2749, 2753, 2895, 2899, 2903, 2907, 2917, 2923, 2925, 2929, 2937, 2939, 2941, 2945, 2949, 2967, 3065, 3067, 3085, 3089, 3121, 3123, 3125, 3131, 3135, 3137, 3149, and 3165, wherein the 5′ nucleotide represented by U of the antisense oligonucleotide is any nucleotide (e.g., U, A, G, C, T).

142. The dsRNA of any one of claims 92-118, wherein the antisense strand consists of a nucleobase sequence of any one of SEQ ID NOs: 1585, 1599, 1605, 1609, 1711, 1721, 1723, 1727, 1729, 1733, 1735, 1737, 1749, 1753, 1757, 1759, 1763, 1765, 1773, 1999, 2009, 2013, 2025, 2721, 2745, 2747, 2749, 2753, 2917, 2923, 2925, 2929, 2937, 2939, 2941, 2945, 3121, 3123, 3125, 3131, 3135, 3137, and 3149, wherein the 5′ nucleotide represented by U of the antisense oligonucleotide is any nucleotide (e.g., U, A, G, C, T).

143. The dsRNA of any one of claims 92-118, wherein the antisense strand consists of a nucleobase sequence of any one of SEQ ID NOs: 1537, 1545, 1547, 1561, 1563, 1565, 1585, 1599, 1605, 1609, 1623, 1625, 1631, 1661, 1711, 1721, 1723, 1727, 1729, 1733, 1735, 1737, 1749, 1753, 1757, 1759, 1763, 1765, 1773, 1955, 1961, 1967, 1973, 1975, 1977, 1999, 2009, 2013, 2025, 2035, 2039, 2053, 2055, 2081, 2087, 2115, 2117, 2121, 2123, 2159, 2163, 2177, 2179, 2571, 2589, 2599, 2605, 2609, 2613, 2617, 2619, 2623, 2629, 2721, 2745, 2747, 2749, 2753, 2895, 2899, 2903, 2907, 2917, 2923, 2925, 2929, 2937, 2939, 2941, 2945, 2949, 2967, 3065, 3067, 3085, 3089, 3121, 3123, 3125, 3131, 3135, 3137, 3149, 3165, 3211, 3213, 3217, 3249, 3273, 3275, 3277, 3279, and 3289, wherein the 5′ nucleotide represented by U of the antisense oligonucleotide is any nucleotide (e.g., U, A, G, C, T).

144. The dsRNA of any one of claims 92-143, wherein the dsRNA exhibits at least 50% mRNA inhibition at a 0.5 nM dsRNA concentration when determined using a cell assay when compared with a control cell.

145. The dsRNA of any one of claims 92-143, wherein the dsRNA exhibits at least 40% mRNA inhibition at a 0.5 nM dsRNA concentration when determined using a cell assay when compared with a control cell.

146. The dsRNA of any one of claims 92-143, wherein the dsRNA exhibits at least 30% mRNA inhibition at a 0.5 nM dsRNA concentration when determined using a cell assay when compared with a control cell.

147. The dsRNA of any one of claims 92-143, wherein the dsRNA exhibits at least 60% mRNA inhibition at a 10 nM dsRNA concentration when determined using a cell assay when compared with a control cell.

148. The dsRNA of any one of claims 92-143, wherein the dsRNA exhibits at least 50% mRNA inhibition at a 10 nM dsRNA concentration when determined using a cell assay when compared with a control cell.

149. The dsRNA of any one of claims 92-148, wherein the antisense strand is complementary to at least 17 contiguous nucleotides of an MLH1 gene.

150. The dsRNA of any one of claims 92-148, wherein the antisense strand is complementary to at least 19 contiguous nucleotides of an MLH1 gene.

151. The dsRNA of any one of claims 92-148, wherein the antisense strand is complementary to 19 contiguous nucleotides of an MLH1 gene.

152. The dsRNA of any one of claims 92-151, wherein the antisense strand and/or the sense strand comprises a 3′ overhang of at least 1 linked nucleoside; or a 3′ overhang of at least 2 linked nucleosides.

153. A pharmaceutical composition comprising the dsRNA of any one of claims 92-152 and a pharmaceutically acceptable carrier.

154. A composition comprising the dsRNA of any one of claims 92-152 and a lipid nanoparticle, a polyplex nanoparticle, a lipoplex nanoparticle, or a liposome.

155. A vector encoding at least one strand of the dsRNA of any one of claims 92-152.

156. A cell comprising the vector of claim 155.

157. A method of reducing transcription of MLH1 in a cell, the method comprising contacting the cell with the dsRNA of any one of claims 92-152, the pharmaceutical composition of claim 153, the composition of claim 154, the vector of claim 155, or the cell of claim 156 for a time sufficient to obtain degradation of an mRNA transcript of MLH1, thereby reducing expression of MLH1 in the cell.

158. A method of treating, preventing, or delaying progression of a trinucleotide repeat expansion disorder in a subject in need thereof, the method comprising administering to the subject the dsRNA of any one of claims 92-152, the pharmaceutical composition of claim 153, the composition of claim 154, the vector of claim 155, or the cell of claim 156.

159. A method of reducing the level and/or activity of MLH1 in a cell of a subject identified as having a trinucleotide repeat expansion disorder, the method comprising contacting the cell with the dsRNA of any one of claims 92-152, the pharmaceutical composition of claim 153, the composition of claim 154, the vector of claim 155, or the cell of claim 156.

160. A method for reducing expression of MLH1 in a cell comprising contacting the cell with the dsRNA of any one of claims 92-152, the pharmaceutical composition of claim 153, the composition of claim 154, the vector of claim 155, or the cell of claim 156 and maintaining the cell for a time sufficient to obtain degradation of an mRNA transcript of MLH1, thereby reducing expression of MLH1 in the cell.

161. A method of decreasing trinucleotide repeat expansion in a cell, the method comprising contacting the cell with the dsRNA of any one of claims 92-152, the pharmaceutical composition of claim 153, the composition of claim 154, the vector of claim 155, or the cell of claim 156.

162. The method of claim 160 or 161, wherein the cell is in a subject.

163. The method of any one of claims 158, 159, and 162, wherein the subject is a human.

164. The method of any one of claims 158-162, wherein the cell is a cell of the central nervous system or a muscle cell.

165. The method of any one of claims 158, 166, and 162-164, wherein the subject is identified as having a trinucleotide repeat expansion disorder.

166. The method of any one of claims 158, 159, and 161-163, wherein the trinucleotide repeat expansion disorder is a polyglutamine disease.

167. The method of claim 166, wherein the polyglutamine disease is selected from the group consisting of dentatorubropallidoluysian atrophy, Huntington's disease, spinal and bulbar muscular atrophy, spinocerebellar ataxia type 1, spinocerebellar ataxia type 2, spinocerebellar ataxia type 3, spinocerebellar ataxia type 6, spinocerebellar ataxia type 7, spinocerebellar ataxia type 17, and Huntington's disease-like 2.

168. The method of any one of claims 158, 159, and 161-163, wherein the trinucleotide repeat expansion disorder is a non-polyglutamine disease.

169. The method of claim 168, wherein the non-polyglutamine disease is selected from the group consisting of fragile X syndrome, fragile X-associated tremor/ataxia syndrome, fragile XE mental retardation, Friedreich's ataxia, myotonic dystrophy type 1, spinocerebellar ataxia type 8, spinocerebellar ataxia type 12, oculopharyngeal muscular dystrophy, Fragile X-associated premature ovarian failure, FRA2A syndrome, FRA7A syndrome, and early infantile epileptic encephalopathy.

170. A dsRNA of any one of claims 92-152, pharmaceutical composition of claim 153, composition of claim 154, vector of claim 155, or cell of claim 156 for use in prevention or treatment of a trinucleotide repeat expansion disorder.

171. The dsRNA, the pharmaceutical composition, the composition, the vector, or the cell of claim 170, wherein the trinucleotide repeat expansion disorder is selected from the group consisting of dentatorubropallidoluysian atrophy, Huntington's disease, spinal and bulbar muscular atrophy, spinocerebellar ataxia type 1, spinocerebellar ataxia type 2, spinocerebellar ataxia type 3, spinocerebellar ataxia type 6, spinocerebellar ataxia type 7, spinocerebellar ataxia type 17, Huntington's disease-like 2, fragile X syndrome, fragile X-associated tremor/ataxia syndrome, fragile XE mental retardation, Friedreich's ataxia, myotonic dystrophy type 1, spinocerebellar ataxia type 8, spinocerebellar ataxia type 12, oculopharyngeal muscular dystrophy, Fragile X-associated premature ovarian failure, FRA2A syndrome, FRA7A syndrome, and early infantile epileptic encephalopathy.

172. The dsRNA, the pharmaceutical composition, the composition, the vector, or the cell of claim 170 or 171, wherein the trinucleotide repeat expansion disorder is Huntington's disease.

173. The dsRNA, the pharmaceutical composition, the composition, the vector, or the cell for of claim 170 or 171, wherein the trinucleotide repeat expansion disorder is Friedreich's ataxia.

174. The dsRNA, the pharmaceutical composition, the composition, the vector, or the cell of claim 170 or 171, wherein the trinucleotide repeat expansion disorder is myotonic dystrophy type 1.

175. The dsRNA, the pharmaceutical composition, the composition, the vector, or the cell of any of claims 170-174, wherein the dsRNA, pharmaceutical composition, composition, vector, or cell is administered intrathecally.

176. The dsRNA, the pharmaceutical composition, the composition, the vector, or the cell of any of claims 170-174, wherein the dsRNA, pharmaceutical composition, composition, vector, or cell is administered intraventricularly.

177. The dsRNA, the pharmaceutical composition, the composition, the vector, or the cell for use of any of claims 170-174, wherein the dsRNA, pharmaceutical composition, composition, vector, or cell is administered intramuscularly.

178. A method of treating, preventing, or delaying progression of a disorder in a subject in need thereof wherein the subject is suffering from trinucleotide repeat expansion disorder, comprising administering to said subject the dsRNA of any one of claims 92-152, the pharmaceutical composition of claim 153, the composition of claim 154, the vector of claim 155, or the cell of claim 156.

179. The method of claim 178, further comprising administering a second therapeutic agent.

180. The method of claim 179, wherein the second therapeutic agent is an oligonucleotide that hybridizes to an mRNA encoding the Huntingtin gene.

181. A method of preventing or delaying progression of a trinucleotide repeat expansion disorder in a subject, the method comprising administering to the subject the dsRNA of any one of claims 92-152, the pharmaceutical composition of claim 153, the composition of claim 154, the vector of claim 155, or the cell of claim 156 in an amount effective to delay progression of a trinucleotide repeat expansion disorder of the subject.

182. The method of claim 181, wherein the trinucleotide repeat expansion disorder is selected from the group consisting of dentatorubropallidoluysian atrophy, Huntington's disease, spinal and bulbar muscular atrophy, spinocerebellar ataxia type 1, spinocerebellar ataxia type 2, spinocerebellar ataxia type 3, spinocerebellar ataxia type 6, spinocerebellar ataxia type 7, spinocerebellar ataxia type 17, Huntington's disease-like 2, fragile X syndrome, fragile X-associated tremor/ataxia syndrome, fragile XE mental retardation, Friedreich's ataxia, myotonic dystrophy type 1, spinocerebellar ataxia type 8, spinocerebellar ataxia type 12, oculopharyngeal muscular dystrophy, Fragile X-associated premature ovarian failure, FRA2A syndrome, FRA7A syndrome, and early infantile epileptic encephalopathy.

183. The method of claim 181 or 182, wherein the trinucleotide repeat expansion disorder is Huntington's disease.

184. The method of claim 181 or 182, wherein the trinucleotide repeat expansion disorder is Friedrich's ataxia.

185. The method of claim 181 or 182, wherein the trinucleotide repeat expansion disorder is myotonic dystrophy type 1.

186. The method of any of claim 181 or 182, further comprising administering a second therapeutic agent.

187. The method of claim 186, wherein the second therapeutic agent is an oligonucleotide that hybridizes to an mRNA encoding the Huntingtin gene.

188. The method of any of claims 181-187, wherein progression of the trinucleotide repeat expansion disorder is delayed by at least 120 days, for example, at least 6 months, at least 12 months, at least 2 years, at least 3 years, at least 4 years, at least 5 years, at least 10 years or more, when compared with a predicted progression.

189. A dsRNA of any one of claims 92-152, pharmaceutical composition of claim 153, composition of claim 154, vector of claim 155, or cell of claim 156, for use in preventing or delaying progression of a trinucleotide repeat expansion disorder in a subject.

190. The dsRNA, the pharmaceutical composition, the composition, the vector, or the cell of claim 191, wherein the trinucleotide repeat expansion disorder is selected from the group consisting of dentatorubropallidoluysian atrophy, Huntington's disease, spinal and bulbar muscular atrophy, spinocerebellar ataxia type 1, spinocerebellar ataxia type 2, spinocerebellar ataxia type 3, spinocerebellar ataxia type 6, spinocerebellar ataxia type 7, spinocerebellar ataxia type 17, Huntington's disease-like 2, fragile X syndrome, fragile X-associated tremor/ataxia syndrome, fragile XE mental retardation, Friedreich's ataxia, myotonic dystrophy type 1, spinocerebellar ataxia type 8, spinocerebellar ataxia type 12, oculopharyngeal muscular dystrophy, Fragile X-associated premature ovarian failure, FRA2A syndrome, FRA7A syndrome, and early infantile epileptic encephalopathy.

191. The dsRNA, the pharmaceutical composition, the composition, the vector, or the cell of claim 189 or 190, wherein the trinucleotide repeat expansion disorder is Huntington's disease.

192. The dsRNA, the pharmaceutical composition, the composition, the vector, or the cell of claim 189 or 190, wherein the trinucleotide repeat expansion disorder is Friedrich's ataxia.

193. The dsRNA, the pharmaceutical composition, the composition, the vector, or the cell of claim 189 or 190, wherein the trinucleotide repeat expansion disorder is myotonic dystrophy type 1.

194. The dsRNA, the pharmaceutical composition, the composition, the vector, or the cell of any one of claims 189-193, wherein progression of the trinucleotide repeat expansion disorder is delayed by at least 120 days, for example, at least 6 months, at least 12 months, at least 2 years, at least 3 years, at least 4 years, at least 5 years, at least 10 years or more, when compared with a predicted progression.

The application's sequence listing, which the Patent Office published only in electronic form, follows.

SEQUENCE LISTING (3353 sequences)

SEQ ID NO: 1 - DNA, 2662 bp, Homo sapiens
gaagagacccagcaacccacagagttgagaaatttgactggcattcaagctgtccaatcaatagctgccgctgaagggtggggctggatggcgtaagctacagctgaaggaagaacgtgagcacgaggcactgaggtgattggctgaaggcacttccgttgagcatctagacgtttccttggctcttctggcgccaaaatgtcgttcgtggcaggggttattcggcggctggacgagacagtggtgaaccgcatcgcggcgggggaagttatccagcggccagctaatgctatcaaagagatgattgagaactgtttagatgcaaaatccacaagtattcaagtgattgttaaagagggaggcctgaagttgattcagatccaagacaatggcaccgggatcaggaaagaagatctggatattgtatgtgaaaggttcactactagtaaactgcagtcctttgaggatttagccagtatttctacctatggctttcgaggtgaggctttggccagcataagccatgtggctcatgttactattacaacgaaaacagctgatggaaagtgtgcatacagagcaagttactcagatggaaaactgaaagcccctcctaaaccatgtgctggcaatcaagggacccagatcacggtggaggaccttttttacaacatagccacgaggagaaaagctttaaaaaatccaagtgaagaatatgggaaaattttggaagttgttggcaggtattcagtacacaatgcaggcattagtttctcagttaaaaaacaaggagagacagtagctgatgttaggacactacccaatgcctcaaccgtggacaatattcgctccatctttggaaatgctgttagtcgagaactgatagaaattggatgtgaggataaaaccctagccttcaaaatgaatggttacatatccaatgcaaactactcagtgaagaagtgcatcttcttactcttcatcaaccatcgtctggtagaatcaacttccttgagaaaagccatagaaacagtgtatgcagcctatttgcccaaaaacacacacccattcctgtacctcagtttagaaatcagtccccagaatgtggatgttaatgtgcaccccacaaagcatgaagttcacttcctgcacgaggagagcatcctggagcgggtgcagcagcacatcgagagcaagctcctgggctccaattcctccaggatgtacttcacccagactttgctaccaggacttgctggcccctctggggagatggttaaatccacaacaagtctgacctcgtcttctacttctggaagtagtgataaggtctatgcccaccagatggttcgtacagattcccgggaacagaagcttgatgcatttctgcagcctctgagcaaacccctgtccagtcagccccaggccattgtcacagaggataagacagatatttctagtggcagggctaggcagcaagatgaggagatgcttgaactcccagcccctgctgaagtggctgccaaaaatcagagcttggagggggatacaacaaaggggacttcagaaatgtcagagaagagaggacctacttccagcaaccccagaaagagacatcgggaagattctgatgtggaaatggtggaagatgattcccgaaaggaaatgactgcagcttgtaccccccggagaaggatcattaacctcactagtgttttgagtctccaggaagaaattaatgagcagggacatgaggttctccgggagatgttgcataaccactccttcgtgggctgtgtgaatcctcagtgggccttggcacagcatcaaaccaagttataccttctcaacaccaccaagcttagtgaagaactgttctaccagatactcatttatgattttgccaattttggtgttctcaggttatcggagccagcaccgctctttgaccttgccatgcttgccttagatagtccagagagtggctggacagaggaagatggtcccaaagaaggacttgctgaatacattgttgagtttctgaagaagaaggctgagatgcttgcagactatttctctttggaaattgatgaggaagggaacctgattggattaccccttctgattgacaactatgtgccccctttggagggactgcctatcttcattcttcgactagccactgaggtgaattgggacgaagaaaaggaatgttttgaaagcctcagtaaagaatgcgctatgttctattccatccggaagcagtacatatctgaggagtcgaccctctcaggccagcagagtgaagtgcctggctccattccaaactcctggaagtggactgtggaacacattgtctataaagccttgcgctcacacattctgcctcctaaacatttcacagaagatggaaatatcctgcagcttgctaacctgcctgatctatacaaagtctttgagaggtgttaaatatggttatttatgcactgtgggatgtgttcttctttctctgtattccgatacaaagtgttgtatcaaagtgtgatatacaaagtgtaccaacataagtgttggtagcacttaagacttatacttgccttctgatagtattcctttatacacagtggattgattataaataaatagatgtgtcttaacataa

SEQ ID NO: 2 - protein, 756 aa, Homo sapiens
MSFVAGVIRRLDETVVNRIAAGEVIQRPANAIKEMIENCLDAKSTSIQVIVKEGGLKLIQIQDNGTGIRKEDLDIVCERFTTSKLQSFEDLASISTYGFRGEALASISHVAHVTITTKTADGKCAYRASYSDGKLKAPPKPCAGNQGTQITVEDLFYNIATRRKALKNPSEEYGKILEVVGRYSVHNAGISFSVKKQGETVADVRTLPNASTVDNIRSIFGNAVSRELIEIGCEDKTLAFKMNGYISNANYSVKKCIFLLFINHRLVESTSLRKAIETVYAAYLPKNTHPFLYLSLEISPQNVDVNVHPTKHEVHFLHEESILERVQQHIESKLLGSNSSRMYFTQTLLPGLAGPSGEMVKSTTSLTSSSTSGSSDKVYAHQMVRTDSREQKLDAFLQPLSKPLSSQPQAIVTEDKTDISSGRARQQDEEMLELPAPAEVAAKNQSLEGDTTKGTSEMSEKRGPTSSNPRKRHREDSDVEMVEDDSRKEMTAACTPRRRIINLTSVLSLQEEINEQGHEVLREMLHNHSFVGCVNPQWALAQHQTKLYLLNTTKLSEELFYQILIYDFANFGVLRLSEPAPLFDLAMLALDSPESGWTEEDGPKEGLAEYIVEFLKKKAEMLADYFSLEIDEEGNLIGLPLLIDNYVPPLEGLPIFILRLATEVNWDEEKECFESLSKECAMFYSIRKQYISEESTLSGQQSEVPGSIPNSWKWTVEHIVYKALRSHILPPKHFTEDGNILQLANLPDLYKVFERC

SEQ ID NO: 3 - DNA, 2598 bp, Mus musculus
aggactgcagtcggccgaagctgaaggaagaacttgagcgtgaggagctcgagtgattggctgactgggaactcgggcgccaatatggcgtttgtagcaggagttattcggcgtctggacgagacggtagtgaaccgcatagcggcgggggaagtcattcagcggccggccaatgctatcaaagagatgatagaaaactgtttagatgcaaaatctacaaatattcaagtggttgttaaggaaggtggcctgaagctaattcagatccaagacaatggcactggaatcaggaaggaagatctggatattgtgtgtgagaggttcactacgagtaaactgcagacttttgaggatttagccagtatttctacctatggctttcgtggtgaggcattggcaagcataagccatgtggcccatgtcactattacaaccaaaacagctgatgggaaatgtgcgtacagagcaagttactcagatggaaagctgcaagcccctcctaaaccctgtgcaggcaaccagggcaccctgatcacggtggaagaccttttttacaacataatcacaaggaggaaagctttaaaaaatccaagtgaagagtacggaaaaattttggaagttgttggcaggtattcaatacacaattcaggcattagtttctcagttaaaaaacaaggtgagacagtatctgatgtcagaacactgcccaatgccacaaccgtggacaacattcgctccatctttggaaatgcggttagtcgagaactgatagaagttgggtgtgaggataaaaccctagctttcaaaatgaatggctatatatcgaatgcaaactattcagtgaagaagtgcattttcctactcttcatcaaccaccgtctggtagaatcagctgccttgagaaaagccattgaaactgtatatgcagcatacttgcccaaaaacacacacccattcctgtacctcagtttggaaatcagccctcagaacgtggacgtcaatgtacaccccaccaagcacgaagttcactttctgcacgaggagagcattctgcagcgtgtgcagcagcacattgagagcaagctgctgggctccaattcctccaggatgtatttcacccagaccttgcttccaggacttgctgggccttctggggaggcagctagacccacgacaggggtggcttcctcatccactagtggaagtggcgacaaggtctacgcttaccagatggtccgtacggactcccgggagcagaagcttgacgcctttctgcagcctgtaagcagccttgggcccagccagccccaggaccctgcccctgtccgaggggccaggacggagggatctcctgaaagggccacgcgggaggacgaggagatgcttgctctcccagcccccgctgaagcagctgctgagagtgagaacttggagagggaatcactaatggagacttcagacgcagcccagaaggcggcacccacttccagtccaggaagctccagaaagagacatcgggaggactctgatgtggaaatggtggaaaatgcttccgggaaggaaatgacagctgcttgctaccccaggaggaggatcattaacctcaccagcgtcttgagtctccaggaagagattagtgagcggtgccatgagactctccgggagatgctccgtaaccattcctttgtgggctgtgtgaatcctcagtgggccttggcacagcaccagaccaagctctacctcctcaacactaccaagctcagtgaagagctgttctaccagatactcatttatgattttgccaactttggtgttctgaggttatcggaaccagcgccactcttcgacctggccatgctggccttagacagtcctgaaagtggctggacagaggacgacggcccgaaggaagggcttgcagagtacattgttgagtttctgaagaagaaagcggagatgcttgcagactatttctctgtggagatcgatgaggaagggaacctgattggattacctcttctgattgacagctatgtgccacctttggagggactgcctatcttcattcttcgactggccactgaggtgaattgggatgaagaaaaggagtgttttgaaagtctcagtaaagaatgtgctatgttttactccattcggaagcagtatatactggaggagtcgaccctctcaggccagcagagtgacatgcctggctccacgtcaaagccctggaagtggactgtggagcacattatctataaagccttccgctcacacctcctacctccgaagcatttcacagaagatggcaatgtcctgcagcttgccaacctgccagatctatacaaagtctttgagcggtgttaaatacaatcatagccaccgtagagactgcatgaccatccaaggcgaagtgtatggtactaatctggaagccacagaataggacacttggtttccaagctccagggtttccagtgctcactattcttgttctgtatcccagtattggtgctgcaacttaatgtacttcacctgtggattggctgcaaataaactcacgtgtattggtgtgattttttttttttatataaccgc

SEQ ID NO: 4 - DNA, 2274 bp, Rattus norvegicus
atgtcatttgtagcaggagttattcggcgcctggacgagacggtagtgaatcgcatagcggcgggagaagttatccagcggccggccaatgctatcaaagagatgactgaaaactgtttagatgcaaaatctacaaatattcaagtgattgttagagaaggaggcctgaagctaattcagatccaagacaatggcactggaatcaggaaggaagatttggatattgtgtgtgagaggttcactacaagtaaactgcagacctttgaggatttagctatgatttccacctatgggtttcgcggagaggctttggcaagcataagccatgtggcccatgtcactattacaaccaaaacagctgatgggaaatgtgcatacagagcaagttactcagatggaaagctacaagcccctcctaaaccgtgtgcaggcaaccagggtaccctgatcacggtggaagaccttttttacaacataatcacaaggaagaaagctttaaaaaatcccagtgaagagtacgggaagattttggaagttgttggcaggtactcaatacacaattcaggaattagtttctcagttaaaaaacaaggcgagacagtctctgatgtcagaacactacccaatgccacgaccgtagacaacattcgctccatctttggaaatgctgttagtcgagaactgatcgaagttgggtgtgaggataaaaccctagctttcaaaatgaatggctatatctcgaatgcaaactactcagtgaagaagtgcattttcctactcttcatcaaccaccggctggtggaatcggctgccctgaagaaagccatagaagctgtatatgcagcatatttacccaaaaacacgcacccattcctgtacctcattttggaaatcagtccccagaacgtggatgtcaatgtgcaccccaccaagcatgaagttcactttctccatgaggagagtattctggagcgtgtgcagcagcacatcgagagcaagctattgggctccaattcatccaggatgtattttacccagaccttgcttccaggacttgctgggccctctggggaagccgttaaatccacgacaggcatagcttcctcatctactagtggaagtggcgacaaggttcacgcttaccaaatggtccgtacagactctcgggaccagaagctcgatgcctttatgcagcctgtaagcaggcgtctgcccagccagccccaggaccctgtccctgggaacaggacagagggctctcctgaaaaagccatgcagaaggatcaggagatatctgagctcccggcccccatggaagcagctgctgacagtgcgagtttggagagagaatcagtgattggggcttcggaagtggtggcaccccagcggcacccctccagtccaggcagctccagaaagagacatccggaggactccgatgtggaaatgatggaaaatgattcccggaaggaaatgacagctgcttgctacccccggaggaggatcattaacctcaccagtgttttgagtctccaggaagaaattaacgaccggggtcatgagactctccgggagatgctccgtaaccatacctttgtgggctgtgtgaatcctcagtgggccttggcacagcaccagaccaagctctacctcctcaacactaccaagctcagtgaagaactcttctaccagatactcatttacgattttgccaacttcggtgttctcaggttaccggaaccagcaccactctttgacttcgccatgctggccttagatagtcctgaaagtggctggacagaggaagatggcccaaaggaaggacttgcagaatacattgttgagtttttgaagaagaaagccaagatgcttgcagactatttctctgtggaaattgatgaggaagggaacctgattggattacctctcctgattgatagctatgtgccgcctttggagggactgcctatcttcattcttcgactggccactgaggtgaactgggatgaagaggagtgtttcgaaagtctcagtaaagaatgtgctgtgttttactccattcggaagcaatacatactggaggagtcagccctctcaggccagcagagtgacatgcctggctccccttcaaagccctggaagtggactgtggaacacattatctataaagccttccgctcacaccttctgcctccgaagcatttcacagaagatggcaatgtcctgcagctcgccaacctgccagatctgtgcaaagtcttcgaacgctgctaa

SEQ ID NO: 5 - DNA, 2691 bp, Macaca fasciularis
gaggagacccagcaacccacagagttgagaaatttgactggcattcaagctgcccaatcaatagctgccgctgagggtgggtctgggcggcgtaagctacagcttgaaggaagaacgtgagcacgaagcactgaggcgattggctgaaggcacttccgttgagcatctagacgtttcctagactcctctggcgccaaaatgtcgttcgtggcaggggttattcggcggctggacgagacagtggtgaaccgcatcgcggcgggggaggttatccagcggccagctaatgctatcaaagagatgattgagaactgtttagatgcaaaatccacaagtattcaagtgattgttaaagagggaggcctgaagttgattcagatccaagacaatggcactgggatcaggaaagaagatctggatattgtatgtgaaaggttcactacgagtaaactgcagtcctttgaggatttagccagtatttctacctatggctttcgaggtgaggctttggccagcataagccatgtggctcatgttactattacaacaaaaacagctgatggaaagtgtgcatacagagcaagttactcagatggaaaactgaaaggtcctcctaaaccatgtgctggcaatcaagggacccagatcacggtggaggaccttttttacaacatagccacgaggagaaaagctttaaaaaatccaagtgaagaatatgggaaaattttggaaattgttggcaggtattcaatacacaatgcaggcattagtttctcagttaaaaaacagggagagacagtagctgatgttaggacactacccaatgcctcaactgtggacaatattcgctccatctttggaaatgctgttagtcgagaactgatagaaattggatgtgaggataaaaccctagccttcaaaatgaatggttatatatccaatgcaaactactcagtgaagaaatgcatcttcttactcttcatcaaccatcgtctggtagaatcaacttccttgagaaaagccatagaaacagtgtatgcagcctacttgcccaaaaacacacacccattcctgtacctcagtttagaaatcagtccccagaatgtggatgttaatgtgcaccccacaaagcatgaagttcacttcctgcacgaggagagcatcctggagcgggtgcaacagcacatcgagagcaagctcctgggctccaattcctccaggatgtacttcacccagactttgctaccaggacttgctggcccctctggggagatggttaaatccacagcaagtctgacctcctcttctacttctggaagtagtgacaaggtctatgcccaccagatggttcgtacagattcccgggaacagaagcttgatgcatttctgcagcctctgagcaaacccctgtccagtcagtcccaggccattgttccagaggataagacagatatttctagtggcagggctaggcagcaagatgaggagatgcttgaactcccatcccctgctgaagtggctgccaaaaatcagagcctggagggggatacaacaaaggggacgtcagaaatgtcagagaagagaggacccacttccagcaaccccagaaagagacatcgggaagattctgatgtggaaatggtggaagatgattcccgaaaggaaatgactgcagcttgtaccccccggagaaggatcattaacctcactagtgttttgagtctccaggaagaaattaatgagcggggacatgaggttcttcgggagatgttgcataaccactccttcgtgggctgtgtgaatcctcagtgggccttggcacagcatcagaccaagttataccttctcaataccaccaagcttagtgaagaactgttctaccagatactcatttatgattttgccaattttggtgttctgaggttatcggagccagcaccactctttgacctcgccatgcttgccttagatagtccagagagtggctggacagaggaagatggtcccaaagaaggacttgctgaatacattgttgagtttctgaagaagaaggccgagatgcttgcagactatttctctttggaaattgatgaggaagggaacctgattggattaccccttctgattgacaactatgtgccccctttggagggactgcctatcttcattcttcgactagccactgaggtattgaattctttggaccaggtgaattgggacgaagaaaaggaatgttttgaaagcctcagtaaagaatgtgctatgttctactccatccggaagcagtacatatctgaggagtcgaccctctcaggccagcagagtgaagtgcctggctccattccaaactcctggaagtggactgtggaacacattgtttataaagccttgcgctcacacattctgcctcctaaacatttcacagaagatggaaatatcctgcaacttgctaacctgcctgatctatacaaagtctttgagaggtgttaaatatggtcatttatgcactgtgggatgtgttgttctttctctgtattccgatacaaagtgttgtatcaaagtgtggtatacaaagtgtaccaacgtaagtgttggtagcacttaagacttatacttgccttctagctggtagcattcctttatacatggtggattaattataaataaatagtcagatgtatcctaacataa

SEQ ID NO: 6 - DNA, 20 bp, Artificial sequence
  Synthetic oligonucleotide
tgtgggttgctgggtctctt

SEQ ID NO: 7 - DNA, 20 bp, Artificial sequence
  Synthetic oligonucleotide
aactctgtgggttgctgggt

SEQ ID NO: 8 - DNA, 20 bp, Artificial sequence
  Synthetic oligonucleotide
atttctcaactctgtgggtt

SEQ ID NO: 9 - DNA, 20 bp, Artificial sequence
  Synthetic oligonucleotide
aatttctcaactctgtgggt

SEQ ID NO: 10 - DNA, 20 bp, Artificial sequence
  Synthetic oligonucleotide
aaatttctcaactctgtggg

SEQ ID NO: 11 - DNA, 20 bp, Artificial sequence
  Synthetic oligonucleotide
caaatttctcaactctgtgg

SEQ ID NO: 12 - DNA, 20 bp, Artificial sequence
  Synthetic oligonucleotide
tcaaatttctcaactctgtg

SEQ ID NO: 13 - DNA, 20 bp, Artificial sequence
  Synthetic oligonucleotide
gtcaaatttctcaactctgt

SEQ ID NO: 14 - DNA, 20 bp, Artificial sequence
  Synthetic oligonucleotide
agtcaaatttctcaactctg

SEQ ID NO: 15 - DNA, 20 bp, Artificial sequence
  Synthetic oligonucleotide
cagtcaaatttctcaactct

SEQ ID NO: 16 - DNA, 20 bp, Artificial sequence
  Synthetic oligonucleotide
ccagtcaaatttctcaactc

SEQ ID NO: 17 - DNA, 20 bp, Artificial sequence
  Synthetic oligonucleotide
gccagtcaaatttctcaact

SEQ ID NO: 18 - DNA, 20 bp, Artificial sequence
  Synthetic oligonucleotide
tgccagtcaaatttctcaac

SEQ ID NO: 19 - DNA, 20 bp, Artificial sequence
  Synthetic oligonucleotide
atgccagtcaaatttctcaa

SEQ ID NO: 20 - DNA, 20 bp, Artificial sequence
  Synthetic oligonucleotide
aatgccagtcaaatttctca

SEQ ID NO: 21 - DNA, 20 bp, Artificial sequence
  Synthetic oligonucleotide
gaatgccagtcaaatttctc

SEQ ID NO: 22 - DNA, 20 bp, Artificial sequence
  Synthetic oligonucleotide
tgaatgccagtcaaatttct

SEQ ID NO: 23 - DNA, 20 bp, Artificial sequence
  Synthetic oligonucleotide
ttgaatgccagtcaaatttc

SEQ ID NO: 24 - DNA, 20 bp, Artificial sequence
  Synthetic oligonucleotide
cttgaatgccagtcaaattt

SEQ ID NO: 25 - DNA, 20 bp, Artificial sequence
  Synthetic oligonucleotide
gcttgaatgccagtcaaatt

SEQ ID NO: 26 - DNA, 20 bp, Artificial sequence
  Synthetic oligonucleotide
agcttgaatgccagtcaaat

SEQ ID NO: 27 - DNA, 20 bp, Artificial sequence
  Synthetic oligonucleotide
cagcttgaatgccagtcaaa

SEQ ID NO: 28 - DNA, 20 bp, Artificial sequence
  Synthetic oligonucleotide
acagcttgaatgccagtcaa

SEQ ID NO: 29 - DNA, 20 bp, Artificial sequence
  Synthetic oligonucleotide
gacagcttgaatgccagtca

SEQ ID NO: 30 - DNA, 20 bp, Artificial sequence
  Synthetic oligonucleotide
ggacagcttgaatgccagtc

SEQ ID NO: 31 - DNA, 20 bp, Artificial sequence
  Synthetic oligonucleotide
tggacagcttgaatgccagt

SEQ ID NO: 32 - DNA, 20 bp, Artificial sequence
  Synthetic oligonucleotide
ttggacagcttgaatgccag

SEQ ID NO: 33 - DNA, 20 bp, Artificial sequence
  Synthetic oligonucleotide
attggacagcttgaatgcca

SEQ ID NO: 34 - DNA, 20 bp, Artificial sequence
  Synthetic oligonucleotide
gattggacagcttgaatgcc

SEQ ID NO: 35 - DNA, 20 bp, Artificial sequence
  Synthetic oligonucleotide
tgattggacagcttgaatgc

SEQ ID NO: 36 - DNA, 20 bp, Artificial sequence
  Synthetic oligonucleotide
ttgattggacagcttgaatg

SEQ ID NO: 37 - DNA, 20 bp, Artificial sequence
  Synthetic oligonucleotide
attgattggacagcttgaat

SEQ ID NO: 38 - DNA, 20 bp, Artificial sequence
  Synthetic oligonucleotide
tattgattggacagcttgaa

SEQ ID NO: 39 - DNA, 20 bp, Artificial sequence
  Synthetic oligonucleotide
ctattgattggacagcttga

SEQ ID NO: 40 - DNA, 20 bp, Artificial sequence
  Synthetic oligonucleotide
gctattgattggacagcttg

SEQ ID NO: 41 - DNA, 20 bp, Artificial sequence
  Synthetic oligonucleotide
agctattgattggacagctt

SEQ ID NO: 42 - DNA, 20 bp, Artificial sequence
  Synthetic oligonucleotide
gcagctattgattggacagc

SEQ ID NO: 43 - DNA, 20 bp, Artificial sequence
  Synthetic oligonucleotide
ggcagctattgattggacag

SEQ ID NO: 44 - DNA, 20 bp, Artificial sequence
  Synthetic oligonucleotide
cggcagctattgattggaca

SEQ ID NO: 45 - DNA, 20 bp, Artificial sequence
  Synthetic oligonucleotide
tgtagcttacgccatccagc

SEQ ID NO: 46 - DNA, 20 bp, Artificial sequence
  Synthetic oligonucleotide
ctgtagcttacgccatccag

SEQ ID NO: 47 - DNA, 20 bp, Artificial sequence
  Synthetic oligonucleotide
cgttcttccttcagctgtag

SEQ ID NO: 48 - DNA, 20 bp, Artificial sequence
  Synthetic oligonucleotide
acgttcttccttcagctgta

SEQ ID NO: 49 - DNA, 20 bp, Artificial sequence
  Synthetic oligonucleotide
cacgttcttccttcagctgt

SEQ ID NO: 50 - DNA, 20 bp, Artificial sequence
  Synthetic oligonucleotide
tcacgttcttccttcagctg

SEQ ID NO: 51 - DNA, 20 bp, Artificial sequence
  Synthetic oligonucleotide
ctcacgttcttccttcagct

SEQ ID NO: 52 - DNA, 20 bp, Artificial sequence
  Synthetic oligonucleotide
gctcacgttcttccttcagc

SEQ ID NO: 53 - DNA, 20 bp, Artificial sequence
  Synthetic oligonucleotide
tgctcacgttcttccttcag

SEQ ID NO: 54 - DNA, 20 bp, Artificial sequence
  Synthetic oligonucleotide
gtgctcacgttcttccttca

SEQ ID NO: 55 - DNA, 20 bp, Artificial sequence
  Synthetic oligonucleotide
cttcagccaatcacctcagt

SEQ ID NO: 56 - DNA, 20 bp, Artificial sequence
  Synthetic oligonucleotide
ccttcagccaatcacctcag

SEQ ID NO: 57 - DNA, 20 bp, Artificial sequence
  Synthetic oligonucleotide
gccttcagccaatcacctca

SEQ ID NO: 58 - DNA, 20 bp, Artificial sequence
  Synthetic oligonucleotide
gtctagatgctcaacggaag

SEQ ID NO: 59 - DNA, 20 bp, Artificial sequence
  Synthetic oligonucleotide
cgtctagatgctcaacggaa

SEQ ID NO: 60 - DNA, 20 bp, Artificial sequence
  Synthetic oligonucleotide
acgtctagatgctcaacgga

SEQ ID NO: 61 - DNA, 20 bp, Artificial sequence
  Synthetic oligonucleotide
aacgtctagatgctcaacgg

SEQ ID NO: 62 - DNA, 20 bp, Artificial sequence
  Synthetic oligonucleotide
gaaacgtctagatgctcaac

SEQ ID NO: 63 - DNA, 20 bp, Artificial sequence
  Synthetic oligonucleotide
ggaaacgtctagatgctcaa

SEQ ID NO: 64 - DNA, 20 bp, Artificial sequence
  Synthetic oligonucleotide
aggaaacgtctagatgctca

SEQ ID NO: 65 - DNA, 20 bp, Artificial sequence
  Synthetic oligonucleotide
aaggaaacgtctagatgctc

SEQ ID NO: 66 - DNA, 20 bp, Artificial sequence
  Synthetic oligonucleotide
caaggaaacgtctagatgct

SEQ ID NO: 67 - DNA, 20 bp, Artificial sequence
  Synthetic oligonucleotide
ccaaggaaacgtctagatgc

SEQ ID NO: 68 - DNA, 20 bp, Artificial sequence
  Synthetic oligonucleotide
gccaaggaaacgtctagatg

SEQ ID NO: 69 - DNA, 20 bp, Artificial sequence
  Synthetic oligonucleotide
agccaaggaaacgtctagat

SEQ ID NO: 70 - DNA, 20 bp, Artificial sequence
  Synthetic oligonucleotide
gagccaaggaaacgtctaga

SEQ ID NO: 71 - DNA, 20 bp, Artificial sequence
  Synthetic oligonucleotide
agagccaaggaaacgtctag

SEQ ID NO: 72 - DNA, 20 bp, Artificial sequence
  Synthetic oligonucleotide
aagagccaaggaaacgtcta

SEQ ID NO: 73 - DNA, 20 bp, Artificial sequence
  Synthetic oligonucleotide
gaagagccaaggaaacgtct

SEQ ID NO: 74 - DNA, 20 bp, Artificial sequence
  Synthetic oligonucleotide
agaagagccaaggaaacgtc

SEQ ID NO: 75 - DNA, 20 bp, Artificial sequence
  Synthetic oligonucleotide
cagaagagccaaggaaacgt

SEQ ID NO: 76 - DNA, 20 bp, Artificial sequence
  Synthetic oligonucleotide
ccagaagagccaaggaaacg

SEQ ID NO: 77 - DNA, 20 bp, Artificial sequence
  Synthetic oligonucleotide
gccagaagagccaaggaaac

SEQ ID NO: 78 - DNA, 20 bp, Artificial sequence
  Synthetic oligonucleotide
cgccagaagagccaaggaaa

SEQ ID NO: 79 - DNA, 20 bp, Artificial sequence
  Synthetic oligonucleotide
tgccacgaacgacattttgg

SEQ ID NO: 80 - DNA, 20 bp, Artificial sequence
  Synthetic oligonucleotide
ctgccacgaacgacattttg

SEQ ID NO: 81 - DNA, 20 bp, Artificial sequence
  Synthetic oligonucleotide
cctgccacgaacgacatttt

SEQ ID NO: 82 - DNA, 20 bp, Artificial sequence
  Synthetic oligonucleotide
ccctgccacgaacgacattt

SEQ ID NO: 83 - DNA, 20 bp, Artificial sequence
  Synthetic oligonucleotide
ataacccctgccacgaacga

SEQ ID NO: 84 - DNA, 20 bp, Artificial sequence
  Synthetic oligonucleotide
aataacccctgccacgaacg

SEQ ID NO: 85 - DNA, 20 bp, Artificial sequence
  Synthetic oligonucleotide
gaataacccctgccacgaac

SEQ ID NO: 86 - DNA, 20 bp, Artificial sequence
  Synthetic oligonucleotide
cgaataacccctgccacgaa

SEQ ID NO: 87 - DNA, 20 bp, Artificial sequence
  Synthetic oligonucleotide
ttcaccactgtctcgtccag

SEQ ID NO: 88 - DNA, 20 bp, Artificial sequence
  Synthetic oligonucleotide
gttcaccactgtctcgtcca

SEQ ID NO: 89 - DNA, 20 bp, Artificial sequence
  Synthetic oligonucleotide
atgcggttcaccactgtctc

SEQ ID NO: 90 - DNA, 20 bp, Artificial sequence
  Synthetic oligonucleotide
gatgcggttcaccactgtct

SEQ ID NO: 91 - DNA, 20 bp, Artificial sequence
  Synthetic oligonucleotide
catctctttgatagcattag

SEQ ID NO: 92 - DNA, 20 bp, Artificial sequence
  Synthetic oligonucleotide
tcatctctttgatagcatta

SEQ ID NO: 93 - DNA, 20 bp, Artificial sequence
  Synthetic oligonucleotide
atcatctctttgatagcatt

SEQ ID NO: 94 - DNA, 20 bp, Artificial sequence
  Synthetic oligonucleotide
aatcatctctttgatagcat

SEQ ID NO: 95 - DNA, 20 bp, Artificial sequence
  Synthetic oligonucleotide
caatcatctctttgatagca

SEQ ID NO: 96 - DNA, 20 bp, Artificial sequence
  Synthetic oligonucleotide
tcaatcatctctttgatagc

SEQ ID NO: 97 - DNA, 20 bp, Artificial sequence
  Synthetic oligonucleotide
ctcaatcatctctttgatag

SEQ ID NO: 98 - DNA, 20 bp, Artificial sequence
  Synthetic oligonucleotide
tctcaatcatctctttgata

SEQ ID NO: 99 - DNA, 20 bp, Artificial sequence
  Synthetic oligonucleotide
ttctcaatcatctctttgat

SEQ ID NO: 100 - DNA, 20 bp, Artificial sequence
  Synthetic oligonucleotide
gttctcaatcatctctttga

SEQ ID NO: 101 - DNA, 20 bp, Artificial sequence
  Synthetic oligonucleotide
agttctcaatcatctctttg

SEQ ID NO: 102 - DNA, 20 bp, Artificial sequence
  Synthetic oligonucleotide
cagttctcaatcatctcttt

SEQ ID NO: 103 - DNA, 20 bp, Artificial sequence
  Synthetic oligonucleotide
acagttctcaatcatctctt

SEQ ID NO: 104 - DNA, 20 bp, Artificial sequence
  Synthetic oligonucleotide
aacagttctcaatcatctct

SEQ ID NO: 105 - DNA, 20 bp, Artificial sequence
  Synthetic oligonucleotide
aaacagttctcaatcatctc

SEQ ID NO: 106 - DNA, 20 bp, Artificial sequence
  Synthetic oligonucleotide
taaacagttctcaatcatct

SEQ ID NO: 107 - DNA, 20 bp, Artificial sequence
  Synthetic oligonucleotide
ctaaacagttctcaatcatc

SEQ ID NO: 108 - DNA, 20 bp, Artificial sequence
  Synthetic oligonucleotide
tctaaacagttctcaatcat

SEQ ID NO: 109 - DNA, 20 bp, Artificial sequence
  Synthetic oligonucleotide
atctaaacagttctcaatca

SEQ ID NO: 110 - DNA, 20 bp, Artificial sequence
  Synthetic oligonucleotide
catctaaacagttctcaatc

SEQ ID NO: 111 - DNA, 20 bp, Artificial sequence
  Synthetic oligonucleotide
gcatctaaacagttctcaat

SEQ ID NO: 112 - DNA, 20 bp, Artificial sequence
  Synthetic oligonucleotide
tgcatctaaacagttctcaa

SEQ ID NO: 113 - DNA, 20 bp, Artificial sequence
  Synthetic oligonucleotide
ttgcatctaaacagttctca

SEQ ID NO: 114 - DNA, 20 bp, Artificial sequence
  Synthetic oligonucleotide
tttgcatctaaacagttctc

SEQ ID NO: 115 - DNA, 20 bp, Artificial sequence
  Synthetic oligonucleotide
ttttgcatctaaacagttct

SEQ ID NO: 116 - DNA, 20 bp, Artificial sequence
  Synthetic oligonucleotide
attttgcatctaaacagttc

SEQ ID NO: 117 - DNA, 20 bp, Artificial sequence
  Synthetic oligonucleotide
gattttgcatctaaacagtt

SEQ ID NO: 118 - DNA, 20 bp, Artificial sequence
  Synthetic oligonucleotide
ggattttgcatctaaacagt

SEQ ID NO: 119 - DNA, 20 bp, Artificial sequence
  Synthetic oligonucleotide
tggattttgcatctaaacag

SEQ ID NO: 120 - DNA, 20 bp, Artificial sequence
  Synthetic oligonucleotide
gtggattttgcatctaaaca

SEQ ID NO: 121 - DNA, 20 bp, Artificial sequence
  Synthetic oligonucleotide
tgtggattttgcatctaaac

SEQ ID NO: 122 - DNA, 20 bp, Artificial sequence
  Synthetic oligonucleotide
ttgtggattttgcatctaaa

SEQ ID NO: 123 - DNA, 20 bp, Artificial sequence
  Synthetic oligonucleotide
cttgtggattttgcatctaa

SEQ ID NO: 124 - DNA, 20 bp, Artificial sequence
  Synthetic oligonucleotide
acttgtggattttgcatcta

SEQ ID NO: 125 - DNA, 20 bp, Artificial sequence
  Synthetic oligonucleotide
tacttgtggattttgcatct

SEQ ID NO: 126 - DNA, 20 bp, Artificial sequence
  Synthetic oligonucleotide
atacttgtggattttgcatc

SEQ ID NO: 127 - DNA, 20 bp, Artificial sequence
  Synthetic oligonucleotide
aatacttgtggattttgcat

SEQ ID NO: 128 - DNA, 20 bp, Artificial sequence
  Synthetic oligonucleotide
gaatacttgtggattttgca

SEQ ID NO: 129 - DNA, 20 bp, Artificial sequence
  Synthetic oligonucleotide
tgaatacttgtggattttgc

SEQ ID NO: 130 - DNA, 20 bp, Artificial sequence
  Synthetic oligonucleotide
ttgaatacttgtggattttg

SEQ ID NO: 131 - DNA, 20 bp, Artificial sequence
  Synthetic oligonucleotide
cttgaatacttgtggatttt

SEQ ID NO: 132 - DNA, 20 bp, Artificial sequence
  Synthetic oligonucleotide
acttgaatacttgtggattt

SEQ ID NO: 133 - DNA, 20 bp, Artificial sequence
  Synthetic oligonucleotide
cacttgaatacttgtggatt

SEQ ID NO: 134 - DNA, 20 bp, Artificial sequence
  Synthetic oligonucleotide
tcacttgaatacttgtggat

SEQ ID NO: 135 - DNA, 20 bp, Artificial sequence
  Synthetic oligonucleotide
atcacttgaatacttgtgga

SEQ ID NO: 136 - DNA, 20 bp, Artificial sequence
  Synthetic oligonucleotide
aatcacttgaatacttgtgg

SEQ ID NO: 137 - DNA, 20 bp, Artificial sequence
  Synthetic oligonucleotide
caatcacttgaatacttgtg

SEQ ID NO: 138 - DNA, 20 bp, Artificial sequence
  Synthetic oligonucleotide
acaatcacttgaatacttgt

SEQ ID NO: 139 - DNA, 20 bp, Artificial sequence
  Synthetic oligonucleotide
aacaatcacttgaatacttg

SEQ ID NO: 140 - DNA, 20 bp, Artificial sequence
  Synthetic oligonucleotide
taacaatcacttgaatactt

SEQ ID NO: 141 - DNA, 20 bp, Artificial sequence
  Synthetic oligonucleotide
ttaacaatcacttgaatact

SEQ ID NO: 142 - DNA, 20 bp, Artificial sequence
  Synthetic oligonucleotide
tttaacaatcacttgaatac

SEQ ID NO: 143 - DNA, 20 bp, Artificial sequence
  Synthetic oligonucleotide
ctttaacaatcacttgaata

SEQ ID NO: 144 - DNA, 20 bp, Artificial sequence
  Synthetic oligonucleotide
tctttaacaatcacttgaat

SEQ ID NO: 145 - DNA, 20 bp, Artificial sequence
  Synthetic oligonucleotide
ctctttaacaatcacttgaa

SEQ ID NO: 146 - DNA, 20 bp, Artificial sequence
  Synthetic oligonucleotide
cctctttaacaatcacttga

SEQ ID NO: 147 - DNA, 20 bp, Artificial sequence
  Synthetic oligonucleotide
tccctctttaacaatcactt

SEQ ID NO: 148 - DNA, 20 bp, Artificial sequence
  Synthetic oligonucleotide
ctccctctttaacaatcact

SEQ ID NO: 149 - DNA, 20 bp, Artificial sequence
  Synthetic oligonucleotide
cctccctctttaacaatcac

SEQ ID NO: 150 - DNA, 20 bp, Artificial sequence
  Synthetic oligonucleotide
gcctccctctttaacaatca

SEQ ID NO: 151 - DNA, 20 bp, Artificial sequence
  Synthetic oligonucleotide
ggcctccctctttaacaatc

SEQ ID NO: 152 - DNA, 20 bp, Artificial sequence
  Synthetic oligonucleotide
aggcctccctctttaacaat

SEQ ID NO: 153 - DNA, 20 bp, Artificial sequence
  Synthetic oligonucleotide
gaatcaacttcaggcctccc

SEQ ID NO: 154 - DNA, 20 bp, Artificial sequence
  Synthetic oligonucleotide
tgaatcaacttcaggcctcc

SEQ ID NO: 155 - DNA, 20 bp, Artificial sequence
  Synthetic oligonucleotide
cttggatctgaatcaacttc

SEQ ID NO: 156 - DNA, 20 bp, Artificial sequence
  Synthetic oligonucleotide
tcttggatctgaatcaactt

SEQ ID NO: 157 - DNA, 20 bp, Artificial sequence
  Synthetic oligonucleotide
gtcttggatctgaatcaact

SEQ ID NO: 158 - DNA, 20 bp, Artificial sequence
  Synthetic oligonucleotide
tgtcttggatctgaatcaac

SEQ ID NO: 159 - DNA, 20 bp, Artificial sequence
  Synthetic oligonucleotide
ttgtcttggatctgaatcaa

SEQ ID NO: 160 - DNA, 20 bp, Artificial sequence
  Synthetic oligonucleotide
attgtcttggatctgaatca

SEQ ID NO: 161 - DNA, 20 bp, Artificial sequence
  Synthetic oligonucleotide
cattgtcttggatctgaatc

SEQ ID NO: 162 - DNA, 20 bp, Artificial sequence
  Synthetic oligonucleotide
atcccggtgccattgtcttg

SEQ ID NO: 163 - DNA, 20 bp, Artificial sequence
  Synthetic oligonucleotide
gatcccggtgccattgtctt

SEQ ID NO: 164 - DNA, 20 bp, Artificial sequence
  Synthetic oligonucleotide
tgatcccggtgccattgtct

SEQ ID NO: 165 - DNA, 20 bp, Artificial sequence
  Synthetic oligonucleotide
ttcctgatcccggtgccatt

SEQ ID NO: 166 - DNA, 20 bp, Artificial sequence
  Synthetic oligonucleotide
tttcctgatcccggtgccat

SEQ ID NO: 167 - DNA, 20 bp, Artificial sequence
  Synthetic oligonucleotide
ttctttcctgatcccggtgc

SEQ ID NO: 168 - DNA, 20 bp, Artificial sequence
  Synthetic oligonucleotide
cttctttcctgatcccggtg

SEQ ID NO: 169 - DNA, 20 bp, Artificial sequence
  Synthetic oligonucleotide
tcttctttcctgatcccggt

SEQ ID NO: 170 - DNA, 20 bp, Artificial sequence
  Synthetic oligonucleotide
atcttctttcctgatcccgg

SEQ ID NO: 171 - DNA, 20 bp, Artificial sequence
  Synthetic oligonucleotide
gatcttctttcctgatcccg

SEQ ID NO: 172 - DNA, 20 bp, Artificial sequence
  Synthetic oligonucleotide
agatcttctttcctgatccc

SEQ ID NO: 173 - DNA, 20 bp, Artificial sequence
  Synthetic oligonucleotide
cagatcttctttcctgatcc

SEQ ID NO: 174 - DNA, 20 bp, Artificial sequence
  Synthetic oligonucleotide
ccagatcttctttcctgatc

SEQ ID NO: 175 - DNA, 20 bp, Artificial sequence
  Synthetic oligonucleotide
tccagatcttctttcctgat

SEQ ID NO: 176 - DNA, 20 bp, Artificial sequence
  Synthetic oligonucleotide
atccagatcttctttcctga

SEQ ID NO: 177 - DNA, 20 bp, Artificial sequence
  Synthetic oligonucleotide
tatccagatcttctttcctg

SEQ ID NO: 178 - DNA, 20 bp, Artificial sequence
  Synthetic oligonucleotide
atatccagatcttctttcct

SEQ ID NO: 179 - DNA, 20 bp, Artificial sequence
  Synthetic oligonucleotide
aatatccagatcttctttcc

SEQ ID NO: 180 - DNA, 20 bp, Artificial sequence
  Synthetic oligonucleotide
caatatccagatcttctttc

SEQ ID NO: 181 - DNA, 20 bp, Artificial sequence
  Synthetic oligonucleotide
acaatatccagatcttcttt

SEQ ID NO: 182 - DNA, 20 bp, Artificial sequence
  Synthetic oligonucleotide
tacaatatccagatcttctt

SEQ ID NO: 183 - DNA, 20 bp, Artificial sequence
  Synthetic oligonucleotide
atacaatatccagatcttct

SEQ ID NO: 184 - DNA, 20 bp, Artificial sequence
  Synthetic oligonucleotide
catacaatatccagatcttc

SEQ ID NO: 185 - DNA, 20 bp, Artificial sequence
  Synthetic oligonucleotide
acatacaatatccagatctt

SEQ ID NO: 186 - DNA, 20 bp, Artificial sequence
  Synthetic oligonucleotide
cacatacaatatccagatct

SEQ ID NO: 187 - DNA, 20 bp, Artificial sequence
  Synthetic oligonucleotide
tcacatacaatatccagatc

SEQ ID NO: 188 - DNA, 20 bp, Artificial sequence
  Synthetic oligonucleotide
ttcacatacaatatccagat

SEQ ID NO: 189 - DNA, 20 bp, Artificial sequence
  Synthetic oligonucleotide
tttcacatacaatatccaga

SEQ ID NO: 190 - DNA, 20 bp, Artificial sequence
  Synthetic oligonucleotide
ctttcacatacaatatccag

SEQ ID NO: 191 - DNA, 20 bp, Artificial sequence
  Synthetic oligonucleotide
cctttcacatacaatatcca

SEQ ID NO: 192 - DNA, 20 bp, Artificial sequence
  Synthetic oligonucleotide
acctttcacatacaatatcc

SEQ ID NO: 193 - DNA, 20 bp, Artificial sequence
  Synthetic oligonucleotide
aacctttcacatacaatatc

SEQ ID NO: 194 - DNA, 20 bp, Artificial sequence
  Synthetic oligonucleotide
gaacctttcacatacaatat

SEQ ID NO: 195 - DNA, 20 bp, Artificial sequence
  Synthetic oligonucleotide
tgaacctttcacatacaata

SEQ ID NO: 196 - DNA, 20 bp, Artificial sequence
  Synthetic oligonucleotide
ttactagtagtgaacctttc

SEQ ID NO: 197 - DNA, 20 bp, Artificial sequence
  Synthetic oligonucleotide
tttactagtagtgaaccttt

SEQ ID NO: 198 - DNA, 20 bp, Artificial sequence
  Synthetic oligonucleotide
gtttactagtagtgaacctt

SEQ ID NO: 199 - DNA, 20 bp, Artificial sequence
  Synthetic oligonucleotide
tgcagtttactagtagtgaa

SEQ ID NO: 200 - DNA, 20 bp, Artificial sequence
  Synthetic oligonucleotide
ctgcagtttactagtagtga

SEQ ID NO: 201 - DNA, 20 bp, Artificial sequence
  Synthetic oligonucleotide
actgcagtttactagtagtg

SEQ ID NO: 202 - DNA, 20 bp, Artificial sequence
  Synthetic oligonucleotide
gactgcagtttactagtagt

SEQ ID NO: 203 - DNA, 20 bp, Artificial sequence
  Synthetic oligonucleotide
ggactgcagtttactagtag

SEQ ID NO: 204 - DNA, 20 bp, Artificial sequence
  Synthetic oligonucleotide
aggactgcagtttactagta

SEQ ID NO: 205 - DNA, 20 bp, Artificial sequence
  Synthetic oligonucleotide
aaggactgcagtttactagt

SEQ ID NO: 206 - DNA, 20 bp, Artificial sequence
  Synthetic oligonucleotide
aaaggactgcagtttactag

SEQ ID NO: 207 - DNA, 20 bp, Artificial sequence
  Synthetic oligonucleotide
caaaggactgcagtttacta

SEQ ID NO: 208 - DNA, 20 bp, Artificial sequence
  Synthetic oligonucleotide
tcaaaggactgcagtttact

SEQ ID NO: 209 - DNA, 20 bp, Artificial sequence
  Synthetic oligonucleotide
ctcaaaggactgcagtttac

SEQ ID NO: 210 - DNA, 20 bp, Artificial sequence
  Synthetic oligonucleotide
cctcaaaggactgcagttta

SEQ ID NO: 211 - DNA, 20 bp, Artificial sequence
  Synthetic oligonucleotide
tcctcaaaggactgcagttt

SEQ ID NO: 212 - DNA, 20 bp, Artificial sequence
  Synthetic oligonucleotide
actggctaaatcctcaaagg

SEQ ID NO: 213 - DNA, 20 bp, Artificial sequence
  Synthetic oligonucleotide
tactggctaaatcctcaaag

SEQ ID NO: 214 - DNA, 20 bp, Artificial sequence
  Synthetic oligonucleotide
atactggctaaatcctcaaa

SEQ ID NO: 215 - DNA, 20 bp, Artificial sequence
  Synthetic oligonucleotide
aatactggctaaatcctcaa

SEQ ID NO: 216 - DNA, 20 bp, Artificial sequence
  Synthetic oligonucleotide
aaatactggctaaatcctca

SEQ ID NO: 217 - DNA, 20 bp, Artificial sequence
  Synthetic oligonucleotide
gaaatactggctaaatcctc

SEQ ID NO: 218 - DNA, 20 bp, Artificial sequence
  Synthetic oligonucleotide
agaaatactggctaaatcct

SEQ ID NO: 219 - DNA, 20 bp, Artificial sequence
  Synthetic oligonucleotide
tagaaatactggctaaatcc

SEQ ID NO: 220 - DNA, 20 bp, Artificial sequence
  Synthetic oligonucleotide
gtagaaatactggctaaatc

SEQ ID NO: 221 - DNA, 20 bp, Artificial sequence
  Synthetic oligonucleotide
ggtagaaatactggctaaat

SEQ ID NO: 222 - DNA, 20 bp, Artificial sequence
  Synthetic oligonucleotide
aggtagaaatactggctaaa

SEQ ID NO: 223 - DNA, 20 bp, Artificial sequence
  Synthetic oligonucleotide
taggtagaaatactggctaa

SEQ ID NO: 224 - DNA, 20 bp, Artificial sequence
  Synthetic oligonucleotide
ataggtagaaatactggcta

SEQ ID NO: 225 - DNA, 20 bp, Artificial sequence
  Synthetic oligonucleotide
cataggtagaaatactggct

SEQ ID NO: 226 - DNA, 20 bp, Artificial sequence
  Synthetic oligonucleotide
ccataggtagaaatactggc

SEQ ID NO: 227 - DNA, 20 bp, Artificial sequence
  Synthetic oligonucleotide
gccataggtagaaatactgg

SEQ ID NO: 228 - DNA, 20 bp, Artificial sequence
  Synthetic oligonucleotide
agccataggtagaaatactg

SEQ ID NO: 229 - DNA, 20 bp, Artificial sequence
  Synthetic oligonucleotide
aagccataggtagaaatact

SEQ ID NO: 230 - DNA, 20 bp, Artificial sequence
  Synthetic oligonucleotide
aaagccataggtagaaatac

SEQ ID NO: 231 - DNA, 20 bp, Artificial sequence
  Synthetic oligonucleotide
gaaagccataggtagaaata

SEQ ID NO: 232 - DNA, 20 bp, Artificial sequence
  Synthetic oligonucleotide
cgaaagccataggtagaaat

SEQ ID NO: 233 - DNA, 20 bp, Artificial sequence
  Synthetic oligonucleotide
tcgaaagccataggtagaaa

SEQ ID NO: 234 - DNA, 20 bp, Artificial sequence
  Synthetic oligonucleotide
ctcgaaagccataggtagaa

SEQ ID NO: 235 - DNA, 20 bp, Artificial sequence
  Synthetic oligonucleotide
cctcgaaagccataggtaga

SEQ ID NO: 236 - DNA, 20 bp, Artificial sequence
  Synthetic oligonucleotide
ctcacctcgaaagccatagg

SEQ ID NO: 237 - DNA, 20 bp, Artificial sequence
  Synthetic oligonucleotide
cctcacctcgaaagccatag

SEQ ID NO: 238 - DNA, 20 bp, Artificial sequence
  Synthetic oligonucleotide
gcctcacctcgaaagccata

SEQ ID NO: 239 - DNA, 20 bp, Artificial sequence
  Synthetic oligonucleotide
agcctcacctcgaaagccat

SEQ ID NO: 240 - DNA, 20 bp, Artificial sequence
  Synthetic oligonucleotide
aagcctcacctcgaaagcca

SEQ ID NO: 241 - DNA, 20 bp, Artificial sequence
  Synthetic oligonucleotide
aaagcctcacctcgaaagcc

SEQ ID NO: 242 - DNA, 20 bp, Artificial sequence
  Synthetic oligonucleotide
caaagcctcacctcgaaagc

SEQ ID NO: 243 - DNA, 20 bp, Artificial sequence
  Synthetic oligonucleotide
ccaaagcctcacctcgaaag

SEQ ID NO: 244 - DNA, 20 bp, Artificial sequence
  Synthetic oligonucleotide
gccaaagcctcacctcgaaa

SEQ ID NO: 245 - DNA, 20 bp, Artificial sequence
  Synthetic oligonucleotide
taatagtaacatgagccaca

SEQ ID NO: 246 - DNA, 20 bp, Artificial sequence
  Synthetic oligonucleotide
gtaatagtaacatgagccac

SEQ ID NO: 247 - DNA, 20 bp, Artificial sequence
  Synthetic oligonucleotide
tgtaatagtaacatgagcca

SEQ ID NO: 248 - DNA, 20 bp, Artificial sequence
  Synthetic oligonucleotide
ttgtaatagtaacatgagcc

SEQ ID NO: 249 - DNA, 20 bp, Artificial sequence
  Synthetic oligonucleotide
gttgtaatagtaacatgagc

SEQ ID NO: 250 - DNA, 20 bp, Artificial sequence
  Synthetic oligonucleotide
cgttgtaatagtaacatgag

SEQ ID NO: 251 - DNA, 20 bp, Artificial sequence
  Synthetic oligonucleotide
tcgttgtaatagtaacatga

SEQ ID NO: 252 - DNA, 20 bp, Artificial sequence
  Synthetic oligonucleotide
ttcgttgtaatagtaacatg

SEQ ID NO: 253 - DNA, 20 bp, Artificial sequence
  Synthetic oligonucleotide
tttcgttgtaatagtaacat

SEQ ID NO: 254 - DNA, 20 bp, Artificial sequence
  Synthetic oligonucleotide
ttttcgttgtaatagtaaca

SEQ ID NO: 255 - DNA, 20 bp, Artificial sequence
  Synthetic oligonucleotide
gttttcgttgtaatagtaac

SEQ ID NO: 256 - DNA, 20 bp, Artificial sequence
  Synthetic oligonucleotide
tgttttcgttgtaatagtaa

SEQ ID NO: 257 - DNA, 20 bp, Artificial sequence
  Synthetic oligonucleotide
ctgttttcgttgtaatagta

SEQ ID NO: 258 - DNA, 20 bp, Artificial sequence
  Synthetic oligonucleotide
gctgttttcgttgtaatagt

SEQ ID NO: 259 - DNA, 20 bp, Artificial sequence
  Synthetic oligonucleotide
agctgttttcgttgtaatag

SEQ ID NO: 260 - DNA, 20 bp, Artificial sequence
  Synthetic oligonucleotide
cagctgttttcgttgtaata

SEQ ID NO: 261 - DNA, 20 bp, Artificial sequence
  Synthetic oligonucleotide
tcagctgttttcgttgtaat

SEQ ID NO: 262 - DNA, 20 bp, Artificial sequence
  Synthetic oligonucleotide
atcagctgttttcgttgtaa

SEQ ID NO: 263 - DNA, 20 bp, Artificial sequence
  Synthetic oligonucleotide
catcagctgttttcgttgta

SEQ ID NO: 264 - DNA, 20 bp, Artificial sequence
  Synthetic oligonucleotide
ccatcagctgttttcgttgt

SEQ ID NO: 265 - DNA, 20 bp, Artificial sequence
  Synthetic oligonucleotide
tccatcagctgttttcgttg

SEQ ID NO: 266 - DNA, 20 bp, Artificial sequence
  Synthetic oligonucleotide
ttccatcagctgttttcgtt

SEQ ID NO: 267 - DNA, 20 bp, Artificial sequence
  Synthetic oligonucleotide
tttccatcagctgttttcgt

SEQ ID NO: 268 - DNA, 20 bp, Artificial sequence
  Synthetic oligonucleotide
ctttccatcagctgttttcg

SEQ ID NO: 269 - DNA, 20 bp, Artificial sequence
  Synthetic oligonucleotide
actttccatcagctgttttc

SEQ ID NO: 270 - DNA, 20 bp, Artificial sequence
  Synthetic oligonucleotide
cactttccatcagctgtttt

SEQ ID NO: 271 - DNA, 20 bp, Artificial sequence
  Synthetic oligonucleotide
acactttccatcagctgttt

SEQ ID NO: 272 - DNA, 20 bp, Artificial sequence
  Synthetic oligonucleotide
cacactttccatcagctgtt

SEQ ID NO: 273 - DNA, 20 bp, Artificial sequence
  Synthetic oligonucleotide
gcacactttccatcagctgt

SEQ ID NO: 274 - DNA, 20 bp, Artificial sequence
  Synthetic oligonucleotide
tgcacactttccatcagctg

SEQ ID NO: 275 - DNA, 20 bp, Artificial sequence
  Synthetic oligonucleotide
atgcacactttccatcagct

SEQ ID NO: 276 - DNA, 20 bp, Artificial sequence
  Synthetic oligonucleotide
tatgcacactttccatcagc

SEQ ID NO: 277 - DNA, 20 bp, Artificial sequence
  Synthetic oligonucleotide
gtatgcacactttccatcag

SEQ ID NO: 278 - DNA, 20 bp, Artificial sequence
  Synthetic oligonucleotide
tgtatgcacactttccatca

SEQ ID NO: 279 - DNA, 20 bp, Artificial sequence
  Synthetic oligonucleotide
ctgtatgcacactttccatc

SEQ ID NO: 280 - DNA, 20 bp, Artificial sequence
  Synthetic oligonucleotide
tctgtatgcacactttccat

SEQ ID NO: 281 - DNA, 20 bp, Artificial sequence
  Synthetic oligonucleotide
ctctgtatgcacactttcca

SEQ ID NO: 282 - DNA, 20 bp, Artificial sequence
  Synthetic oligonucleotide
gctctgtatgcacactttcc

SEQ ID NO: 283 - DNA, 20 bp, Artificial sequence
  Synthetic oligonucleotide
tgctctgtatgcacactttc

SEQ ID NO: 284 - DNA, 20 bp, Artificial sequence
  Synthetic oligonucleotide
gagtaacttgctctgtatgc

SEQ ID NO: 285 - DNA, 20 bp, Artificial sequence
  Synthetic oligonucleotide
tgagtaacttgctctgtatg

SEQ ID NO: 286 - DNA, 20 bp, Artificial sequence
  Synthetic oligonucleotide
ctgagtaacttgctctgtat

SEQ ID NO: 287 - DNA, 20 bp, Artificial sequence
  Synthetic oligonucleotide
tctgagtaacttgctctgta

SEQ ID NO: 288 - DNA, 20 bp, Artificial sequence
  Synthetic oligonucleotide
atctgagtaacttgctctgt

SEQ ID NO: 289 - DNA, 20 bp, Artificial sequence
  Synthetic oligonucleotide
catctgagtaacttgctctg

SEQ ID NO: 290 - DNA, 20 bp, Artificial sequence
  Synthetic oligonucleotide
ccatctgagtaacttgctct

SEQ ID NO: 291 - DNA, 20 bp, Artificial sequence
  Synthetic oligonucleotide
tccatctgagtaacttgctc

SEQ ID NO: 292 - DNA, 20 bp, Artificial sequence
  Synthetic oligonucleotide
ttccatctgagtaacttgct

SEQ ID NO: 293 - DNA, 20 bp, Artificial sequence
  Synthetic oligonucleotide
tttccatctgagtaacttgc

SEQ ID NO: 294 - DNA, 20 bp, Artificial sequence
  Synthetic oligonucleotide
ttttccatctgagtaacttg

SEQ ID NO: 295 - DNA, 20 bp, Artificial sequence
  Synthetic oligonucleotide
gttttccatctgagtaactt

SEQ ID NO: 296 - DNA, 20 bp, Artificial sequence
  Synthetic oligonucleotide
agttttccatctgagtaact

SEQ ID NO: 297 - DNA, 20 bp, Artificial sequence
  Synthetic oligonucleotide
cagttttccatctgagtaac

SEQ ID NO: 298 - DNA, 20 bp, Artificial sequence
  Synthetic oligonucleotide
tcagttttccatctgagtaa

SEQ ID NO: 299 - DNA, 20 bp, Artificial sequence
  Synthetic oligonucleotide
ggctttcagttttccatctg

SEQ ID NO: 300 - DNA, 20 bp, Artificial sequence
  Synthetic oligonucleotide
gggctttcagttttccatct

SEQ ID NO: 301 - DNA, 20 bp, Artificial sequence
  Synthetic oligonucleotide
cagcacatggtttaggaggg

SEQ ID NO: 302 - DNA, 20 bp, Artificial sequence
  Synthetic oligonucleotide
cccttgattgccagcacatg

SEQ ID NO: 303 - DNA, 20 bp, Artificial sequence
  Synthetic oligonucleotide
tcccttgattgccagcacat

SEQ ID NO: 304 - DNA, 20 bp, Artificial sequence
  Synthetic oligonucleotide
gtcccttgattgccagcaca

SEQ ID NO: 305 - DNA, 20 bp, Artificial sequence
  Synthetic oligonucleotide
tctgggtcccttgattgcca

SEQ ID NO: 306 - DNA, 20 bp, Artificial sequence
  Synthetic oligonucleotide
atctgggtcccttgattgcc

SEQ ID NO: 307 - DNA, 20 bp, Artificial sequence
  Synthetic oligonucleotide
gatctgggtcccttgattgc

SEQ ID NO: 308 - DNA, 20 bp, Artificial sequence
  Synthetic oligonucleotide
tgatctgggtcccttgattg

SEQ ID NO: 309 - DNA, 20 bp, Artificial sequence
  Synthetic oligonucleotide
gtgatctgggtcccttgatt

SEQ ID NO: 310 - DNA, 20 bp, Artificial sequence
  Synthetic oligonucleotide
cgtgatctgggtcccttgat

SEQ ID NO: 311 - DNA, 20 bp, Artificial sequence
  Synthetic oligonucleotide
tcgtggctatgttgtaaaaa

SEQ ID NO: 312 - DNA, 20 bp, Artificial sequence
  Synthetic oligonucleotide
ctcgtggctatgttgtaaaa

SEQ ID NO: 313 - DNA, 20 bp, Artificial sequence
  Synthetic oligonucleotide
cctcgtggctatgttgtaaa

SEQ ID NO: 314 - DNA, 20 bp, Artificial sequence
  Synthetic oligonucleotide
tcctcgtggctatgttgtaa

SEQ ID NO: 315 - DNA, 20 bp, Artificial sequence
  Synthetic oligonucleotide
ctcctcgtggctatgttgta

SEQ ID NO: 316 - DNA, 20 bp, Artificial sequence
  Synthetic oligonucleotide
tctcctcgtggctatgttgt

SEQ ID NO: 317 - DNA, 20 bp, Artificial sequence
  Synthetic oligonucleotide
ttctcctcgtggctatgttg

SEQ ID NO: 318 - DNA, 20 bp, Artificial sequence
  Synthetic oligonucleotide
tttctcctcgtggctatgtt

SEQ ID NO: 319 - DNA, 20 bp, Artificial sequence
  Synthetic oligonucleotide
ttttctcctcgtggctatgt

SEQ ID NO: 320 - DNA, 20 bp, Artificial sequence
  Synthetic oligonucleotide
cttttctcctcgtggctatg

SEQ ID NO: 321 - DNA, 20 bp, Artificial sequence
  Synthetic oligonucleotide
gcttttctcctcgtggctat

SEQ ID NO: 322 - DNA, 20 bp, Artificial sequence
  Synthetic oligonucleotide
agcttttctcctcgtggcta

SEQ ID NO: 323 - DNA, 20 bp, Artificial sequence
  Synthetic oligonucleotide
aagcttttctcctcgtggct

SEQ ID NO: 324 - DNA, 20 bp, Artificial sequence
  Synthetic oligonucleotide
aaagcttttctcctcgtggc

SEQ ID NO: 325 - DNA, 20 bp, Artificial sequence
  Synthetic oligonucleotide
taaagcttttctcctcgtgg

SEQ ID NO: 326 - DNA, 20 bp, Artificial sequence
  Synthetic oligonucleotide
ttaaagcttttctcctcgtg

SEQ ID NO: 327 - DNA, 20 bp, Artificial sequence
  Synthetic oligonucleotide
tttaaagcttttctcctcgt

SEQ ID NO: 328 - DNA, 20 bp, Artificial sequence
  Synthetic oligonucleotide
ttttaaagcttttctcctcg

SEQ ID NO: 329 - DNA, 20 bp, Artificial sequence
  Synthetic oligonucleotide
tttttaaagcttttctcctc

SEQ ID NO: 330 - DNA, 20 bp, Artificial sequence
  Synthetic oligonucleotide
tattcttcacttggattttt

SEQ ID NO: 331 - DNA, 20 bp, Artificial sequence
  Synthetic oligonucleotide
atattcttcacttggatttt

SEQ ID NO: 332 - DNA, 20 bp, Artificial sequence
  Synthetic oligonucleotide
catattcttcacttggattt

SEQ ID NO: 333 - DNA, 20 bp, Artificial sequence
  Synthetic oligonucleotide
ccatattcttcacttggatt

SEQ ID NO: 334 - DNA, 20 bp, Artificial sequence
  Synthetic oligonucleotide
cccatattcttcacttggat

SEQ ID NO: 335 - DNA, 20 bp, Artificial sequence
  Synthetic oligonucleotide
tcccatattcttcacttgga

SEQ ID NO: 336 - DNA, 20 bp, Artificial sequence
  Synthetic oligonucleotide
ttcccatattcttcacttgg

SEQ ID NO: 337 - DNA, 20 bp, Artificial sequence
  Synthetic oligonucleotide
tttcccatattcttcacttg

SEQ ID NO: 338 - DNA, 20 bp, Artificial sequence
  Synthetic oligonucleotide
ttttcccatattcttcactt

SEQ ID NO: 339 - DNA, 20 bp, Artificial sequence
  Synthetic oligonucleotide
attttcccatattcttcact

SEQ ID NO: 340 - DNA, 20 bp, Artificial sequence
  Synthetic oligonucleotide
aattttcccatattcttcac

SEQ ID NO: 341 - DNA, 20 bp, Artificial sequence
  Synthetic oligonucleotide
aaattttcccatattcttca

SEQ ID NO: 342 - DNA, 20 bp, Artificial sequence
  Synthetic oligonucleotide
aaaattttcccatattcttc

SEQ ID NO: 343 - DNA, 20 bp, Artificial sequence
  Synthetic oligonucleotide
caaaattttcccatattctt

SEQ ID NO: 344 - DNA, 20 bp, Artificial sequence
  Synthetic oligonucleotide
ccaaaattttcccatattct

SEQ ID NO: 345 - DNA, 20 bp, Artificial sequence
  Synthetic oligonucleotide
tccaaaattttcccatattc

SEQ ID NO: 346 - DNA, 20 bp, Artificial sequence
  Synthetic oligonucleotide
ttccaaaattttcccatatt

SEQ ID NO: 347 - DNA, 20 bp, Artificial sequence
  Synthetic oligonucleotide
cttccaaaattttcccatat

SEQ ID NO: 348 - DNA, 20 bp, Artificial sequence
  Synthetic oligonucleotide
acttccaaaattttcccata

SEQ ID NO: 349 - DNA, 20 bp, Artificial sequence
  Synthetic oligonucleotide
aacttccaaaattttcccat

SEQ ID NO: 350 - DNA, 20 bp, Artificial sequence
  Synthetic oligonucleotide
caacttccaaaattttccca

SEQ ID NO: 351 - DNA, 20 bp, Artificial sequence
  Synthetic oligonucleotide
acaacttccaaaattttccc

SEQ ID NO: 352 - DNA, 20 bp, Artificial sequence
  Synthetic oligonucleotide
aacaacttccaaaattttcc

SEQ ID NO: 353 - DNA, 20 bp, Artificial sequence
  Synthetic oligonucleotide
caacaacttccaaaattttc

SEQ ID NO: 354 - DNA, 20 bp, Artificial sequence
  Synthetic oligonucleotide
ccaacaacttccaaaatttt

SEQ ID NO: 355 - DNA, 20 bp, Artificial sequence
  Synthetic oligonucleotide
gccaacaacttccaaaattt

SEQ ID NO: 356 - DNA, 20 bp, Artificial sequence
  Synthetic oligonucleotide
tgccaacaacttccaaaatt

SEQ ID NO: 357 - DNA, 20 bp, Artificial sequence
  Synthetic oligonucleotide
ctgccaacaacttccaaaat

SEQ ID NO: 358 - DNA, 20 bp, Artificial sequence
  Synthetic oligonucleotide
cctgccaacaacttccaaaa

SEQ ID NO: 359 - DNA, 20 bp, Artificial sequence
  Synthetic oligonucleotide
acctgccaacaacttccaaa

SEQ ID NO: 360 - DNA, 20 bp, Artificial sequence
  Synthetic oligonucleotide
tacctgccaacaacttccaa

SEQ ID NO: 361 - DNA, 20 bp, Artificial sequence
  Synthetic oligonucleotide
atacctgccaacaacttcca

SEQ ID NO: 362 - DNA, 20 bp, Artificial sequence
  Synthetic oligonucleotide
aatacctgccaacaacttcc

SEQ ID NO: 363 - DNA, 20 bp, Artificial sequence
  Synthetic oligonucleotide
gaatacctgccaacaacttc

SEQ ID NO: 364 - DNA, 20 bp, Artificial sequence
  Synthetic oligonucleotide
tgaatacctgccaacaactt

SEQ ID NO: 365 - DNA, 20 bp, Artificial sequence
  Synthetic oligonucleotide
ctgaatacctgccaacaact

SEQ ID NO: 366 - DNA, 20 bp, Artificial sequence
  Synthetic oligonucleotide
actgaatacctgccaacaac

SEQ ID NO: 367 - DNA, 20 bp, Artificial sequence
  Synthetic oligonucleotide
tactgaatacctgccaacaa

SEQ ID NO: 368 - DNA, 20 bp, Artificial sequence
  Synthetic oligonucleotide
gtactgaatacctgccaaca

SEQ ID NO: 369 - DNA, 20 bp, Artificial sequence
  Synthetic oligonucleotide
tgtactgaatacctgccaac

SEQ ID NO: 370 - DNA, 20 bp, Artificial sequence
  Synthetic oligonucleotide
gtgtactgaatacctgccaa

SEQ ID NO: 371 - DNA, 20 bp, Artificial sequence
  Synthetic oligonucleotide
tgtgtactgaatacctgcca

SEQ ID NO: 372 - DNA, 20 bp, Artificial sequence
  Synthetic oligonucleotide
ttgtgtactgaatacctgcc

SEQ ID NO: 373 - DNA, 20 bp, Artificial sequence
  Synthetic oligonucleotide
attgtgtactgaatacctgc

SEQ ID NO: 374 - DNA, 20 bp, Artificial sequence
  Synthetic oligonucleotide
cattgtgtactgaatacctg

SEQ ID NO: 375 - DNA, 20 bp, Artificial sequence
  Synthetic oligonucleotide
gcattgtgtactgaatacct

SEQ ID NO: 376 - DNA, 20 bp, Artificial sequence
  Synthetic oligonucleotide
tgcattgtgtactgaatacc

SEQ ID NO: 377 - DNA, 20 bp, Artificial sequence
  Synthetic oligonucleotide
ctgcattgtgtactgaatac

SEQ ID NO: 378 - DNA, 20 bp, Artificial sequence
  Synthetic oligonucleotide
cctgcattgtgtactgaata

SEQ ID NO: 379 - DNA, 20 bp, Artificial sequence
  Synthetic oligonucleotide
gcctgcattgtgtactgaat

SEQ ID NO: 380 - DNA, 20 bp, Artificial sequence
  Synthetic oligonucleotide
tgcctgcattgtgtactgaa

SEQ ID NO: 381 - DNA, 20 bp, Artificial sequence
  Synthetic oligonucleotide
atgcctgcattgtgtactga

SEQ ID NO: 382 - DNA, 20 bp, Artificial sequence
  Synthetic oligonucleotide
ctgagaaactaatgcctgca

SEQ ID NO: 383 - DNA, 20 bp, Artificial sequence
  Synthetic oligonucleotide
actgagaaactaatgcctgc

SEQ ID NO: 384 - DNA, 20 bp, Artificial sequence
  Synthetic oligonucleotide
aactgagaaactaatgcctg

SEQ ID NO: 385 - DNA, 20 bp, Artificial sequence
  Synthetic oligonucleotide
taactgagaaactaatgcct

SEQ ID NO: 386 - DNA, 20 bp, Artificial sequence
  Synthetic oligonucleotide
ttaactgagaaactaatgcc

SEQ ID NO: 387 - DNA, 20 bp, Artificial sequence
  Synthetic oligonucleotide
tttaactgagaaactaatgc

SEQ ID NO: 388 - DNA, 20 bp, Artificial sequence
  Synthetic oligonucleotide
ttttaactgagaaactaatg

SEQ ID NO: 389 - DNA, 20 bp, Artificial sequence
  Synthetic oligonucleotide
tactgtctctccttgttttt

SEQ ID NO: 390 - DNA, 20 bp, Artificial sequence
  Synthetic oligonucleotide
ctactgtctctccttgtttt

SEQ ID NO: 391 - DNA, 20 bp, Artificial sequence
  Synthetic oligonucleotide
gctactgtctctccttgttt

SEQ ID NO: 392 - DNA, 20 bp, Artificial sequence
  Synthetic oligonucleotide
agctactgtctctccttgtt

SEQ ID NO: 393 - DNA, 20 bp, Artificial sequence
  Synthetic oligonucleotide
cagctactgtctctccttgt

SEQ ID NO: 394 - DNA, 20 bp, Artificial sequence
  Synthetic oligonucleotide
tcagctactgtctctccttg

SEQ ID NO: 395 - DNA, 20 bp, Artificial sequence
  Synthetic oligonucleotide
atcagctactgtctctcctt

SEQ ID NO: 396 - DNA, 20 bp, Artificial sequence
  Synthetic oligonucleotide
catcagctactgtctctcct

SEQ ID NO: 397 - DNA, 20 bp, Artificial sequence
  Synthetic oligonucleotide
acatcagctactgtctctcc

SEQ ID NO: 398 - DNA, 20 bp, Artificial sequence
  Synthetic oligonucleotide
aacatcagctactgtctctc

SEQ ID NO: 399 - DNA, 20 bp, Artificial sequence
  Synthetic oligonucleotide
taacatcagctactgtctct

SEQ ID NO: 400 - DNA, 20 bp, Artificial sequence
  Synthetic oligonucleotide
ctaacatcagctactgtctc

SEQ ID NO: 401 - DNA, 20 bp, Artificial sequence
  Synthetic oligonucleotide
cctaacatcagctactgtct

SEQ ID NO: 402 - DNA, 20 bp, Artificial sequence
  Synthetic oligonucleotide
tcctaacatcagctactgtc

SEQ ID NO: 403 - DNA, 20 bp, Artificial sequence
  Synthetic oligonucleotide
gtcctaacatcagctactgt

SEQ ID NO: 404 - DNA, 20 bp, Artificial sequence
  Synthetic oligonucleotide
tgtcctaacatcagctactg

SEQ ID NO: 405 - DNA, 20 bp, Artificial sequence
  Synthetic oligonucleotide
gtgtcctaacatcagctact

SEQ ID NO: 406 - DNA, 20 bp, Artificial sequence
  Synthetic oligonucleotide
agtgtcctaacatcagctac

SEQ ID NO: 407 - DNA, 20 bp, Artificial sequence
  Synthetic oligonucleotide
tagtgtcctaacatcagcta

SEQ ID NO: 408 - DNA, 20 bp, Artificial sequence
  Synthetic oligonucleotide
gtagtgtcctaacatcagct

SEQ ID NO: 409 - DNA, 20 bp, Artificial sequence
  Synthetic oligonucleotide
ggtagtgtcctaacatcagc

SEQ ID NO: 410 - DNA, 20 bp, Artificial sequence
  Synthetic oligonucleotide
gggtagtgtcctaacatcag

SEQ ID NO: 411 - DNA, 20 bp, Artificial sequence
  Synthetic oligonucleotide
tgggtagtgtcctaacatca

SEQ ID NO: 412 - DNA, 20 bp, Artificial sequence
  Synthetic oligonucleotide
ttgggtagtgtcctaacatc

SEQ ID NO: 413 - DNA, 20 bp, Artificial sequence
  Synthetic oligonucleotide
attgggtagtgtcctaacat

SEQ ID NO: 414 - DNA, 20 bp, Artificial sequence
  Synthetic oligonucleotide
cattgggtagtgtcctaaca

SEQ ID NO: 415 - DNA, 20 bp, Artificial sequence
  Synthetic oligonucleotide
gcattgggtagtgtcctaac

SEQ ID NO: 416 - DNA, 20 bp, Artificial sequence
  Synthetic oligonucleotide
ggcattgggtagtgtcctaa

SEQ ID NO: 417 - DNA, 20 bp, Artificial sequence
  Synthetic oligonucleotide
aggcattgggtagtgtccta

SEQ ID NO: 418 - DNA, 20 bp, Artificial sequence
  Synthetic oligonucleotide
gaggcattgggtagtgtcct

SEQ ID NO: 419 - DNA, 20 bp, Artificial sequence
  Synthetic oligonucleotide
tgaggcattgggtagtgtcc

SEQ ID NO: 420 - DNA, 20 bp, Artificial sequence
  Synthetic oligonucleotide
ttgaggcattgggtagtgtc

SEQ ID NO: 421 - DNA, 20 bp, Artificial sequence
  Synthetic oligonucleotide
gttgaggcattgggtagtgt

SEQ ID NO: 422 - DNA, 20 bp, Artificial sequence
  Synthetic oligonucleotide
ggttgaggcattgggtagtg

SEQ ID NO: 423 - DNA, 20 bp, Artificial sequence
  Synthetic oligonucleotide
cggttgaggcattgggtagt

SEQ ID NO: 424 - DNA, 20 bp, Artificial sequence
  Synthetic oligonucleotide
acggttgaggcattgggtag

SEQ ID NO: 425 - DNA, 20 bp, Artificial sequence
  Synthetic oligonucleotide
cacggttgaggcattgggta

SEQ ID NO: 426 - DNA, 20 bp, Artificial sequence
  Synthetic oligonucleotide
tgtccacggttgaggcattg

SEQ ID NO: 427 - DNA, 20 bp, Artificial sequence
  Synthetic oligonucleotide
ttgtccacggttgaggcatt

SEQ ID NO: 428 - DNA, 20 bp, Artificial sequence
  Synthetic oligonucleotide
attgtccacggttgaggcat

SEQ ID NO: 429 - DNA, 20 bp, Artificial sequence
  Synthetic oligonucleotide
tattgtccacggttgaggca

SEQ ID NO: 430 - DNA, 20 bp, Artificial sequence
  Synthetic oligonucleotide
atattgtccacggttgaggc

SEQ ID NO: 431 - DNA, 20 bp, Artificial sequence
  Synthetic oligonucleotide
aatattgtccacggttgagg

SEQ ID NO: 432 - DNA, 20 bp, Artificial sequence
  Synthetic oligonucleotide
gaatattgtccacggttgag

SEQ ID NO: 433 - DNA, 20 bp, Artificial sequence
  Synthetic oligonucleotide
cgaatattgtccacggttga

SEQ ID NO: 434 - DNA, 20 bp, Artificial sequence
  Synthetic oligonucleotide
gcgaatattgtccacggttg

SEQ ID NO: 435 - DNA, 20 bp, Artificial sequence
  Synthetic oligonucleotide
agcgaatattgtccacggtt

SEQ ID NO: 436 - DNA, 20 bp, Artificial sequence
  Synthetic oligonucleotide
ggagcgaatattgtccacgg

SEQ ID NO: 437 - DNA, 20 bp, Artificial sequence
  Synthetic oligonucleotide
tggagcgaatattgtccacg

SEQ ID NO: 438 - DNA, 20 bp, Artificial sequence
  Synthetic oligonucleotide
agatggagcgaatattgtcc

SEQ ID NO: 439 - DNA, 20 bp, Artificial sequence
  Synthetic oligonucleotide
aagatggagcgaatattgtc

SEQ ID NO: 440 - DNA, 20 bp, Artificial sequence
  Synthetic oligonucleotide
aaagatggagcgaatattgt

SEQ ID NO: 441 - DNA, 20 bp, Artificial sequence
  Synthetic oligonucleotide
caaagatggagcgaatattg

SEQ ID NO: 442 - DNA, 20 bp, Artificial sequence
  Synthetic oligonucleotide
taacagcatttccaaagatg

SEQ ID NO: 443 - DNA, 20 bp, Artificial sequence
  Synthetic oligonucleotide
ctaacagcatttccaaagat

SEQ ID NO: 444 - DNA, 20 bp, Artificial sequence
  Synthetic oligonucleotide
actaacagcatttccaaaga

SEQ ID NO: 445 - DNA, 20 bp, Artificial sequence
  Synthetic oligonucleotide
gactaacagcatttccaaag

SEQ ID NO: 446 - DNA, 20 bp, Artificial sequence
  Synthetic oligonucleotide
cgactaacagcatttccaaa

SEQ ID NO: 447 - DNA, 20 bp, Artificial sequence
  Synthetic oligonucleotide
tcgactaacagcatttccaa

SEQ ID NO: 448 - DNA, 20 bp, Artificial sequence
  Synthetic oligonucleotide
ctcgactaacagcatttcca

SEQ ID NO: 449 - DNA, 20 bp, Artificial sequence
  Synthetic oligonucleotide
tctcgactaacagcatttcc

SEQ ID NO: 450 - DNA, 20 bp, Artificial sequence
  Synthetic oligonucleotide
ttctcgactaacagcatttc

SEQ ID NO: 451 - DNA, 20 bp, Artificial sequence
  Synthetic oligonucleotide
gttctcgactaacagcattt

SEQ ID NO: 452 - DNA, 20 bp, Artificial sequence
  Synthetic oligonucleotide
agttctcgactaacagcatt

SEQ ID NO: 453 - DNA, 20 bp, Artificial sequence
  Synthetic oligonucleotide
cagttctcgactaacagcat

SEQ ID NO: 454 - DNA, 20 bp, Artificial sequence
  Synthetic oligonucleotide
tcagttctcgactaacagca

SEQ ID NO: 455 - DNA, 20 bp, Artificial sequence
  Synthetic oligonucleotide
atcagttctcgactaacagc

SEQ ID NO: 456 - DNA, 20 bp, Artificial sequence
  Synthetic oligonucleotide
tatcagttctcgactaacag

SEQ ID NO: 457 - DNA, 20 bp, Artificial sequence
  Synthetic oligonucleotide
ctatcagttctcgactaaca

SEQ ID NO: 458 - DNA, 20 bp, Artificial sequence
  Synthetic oligonucleotide
tctatcagttctcgactaac

SEQ ID NO: 459 - DNA, 20 bp, Artificial sequence
  Synthetic oligonucleotide
ttctatcagttctcgactaa

SEQ ID NO: 460 - DNA, 20 bp, Artificial sequence
  Synthetic oligonucleotide
tttctatcagttctcgacta

SEQ ID NO: 461 - DNA, 20 bp, Artificial sequence
  Synthetic oligonucleotide
aatttctatcagttctcgac

SEQ ID NO: 462 - DNA, 20 bp, Artificial sequence
  Synthetic oligonucleotide
caatttctatcagttctcga

SEQ ID NO: 463 - DNA, 20 bp, Artificial sequence
  Synthetic oligonucleotide
ccaatttctatcagttctcg

SEQ ID NO: 464 - DNA, 20 bp, Artificial sequence
  Synthetic oligonucleotide
tccaatttctatcagttctc

SEQ ID NO: 465 - DNA, 20 bp, Artificial sequence
  Synthetic oligonucleotide
atccaatttctatcagttct

SEQ ID NO: 466 - DNA, 20 bp, Artificial sequence
  Synthetic oligonucleotide
catccaatttctatcagttc

SEQ ID NO: 467 - DNA, 20 bp, Artificial sequence
  Synthetic oligonucleotide
acatccaatttctatcagtt

SEQ ID NO: 468 - DNA, 20 bp, Artificial sequence
  Synthetic oligonucleotide
cacatccaatttctatcagt

SEQ ID NO: 469 - DNA, 20 bp, Artificial sequence
  Synthetic oligonucleotide
tcacatccaatttctatcag

SEQ ID NO: 470 - DNA, 20 bp, Artificial sequence
  Synthetic oligonucleotide
ctcacatccaatttctatca

SEQ ID NO: 471 - DNA, 20 bp, Artificial sequence
  Synthetic oligonucleotide
cctcacatccaatttctatc

SEQ ID NO: 472 - DNA, 20 bp, Artificial sequence
  Synthetic oligonucleotide
tcctcacatccaatttctat

SEQ ID NO: 473 - DNA, 20 bp, Artificial sequence
  Synthetic oligonucleotide
atcctcacatccaatttcta

SEQ ID NO: 474 - DNA, 20 bp, Artificial sequence
  Synthetic oligonucleotide
tatcctcacatccaatttct

SEQ ID NO: 475 - DNA, 20 bp, Artificial sequence
  Synthetic oligonucleotide
ttatcctcacatccaatttc

SEQ ID NO: 476 - DNA, 20 bp, Artificial sequence
  Synthetic oligonucleotide
tttatcctcacatccaattt

SEQ ID NO: 477 - DNA, 20 bp, Artificial sequence
  Synthetic oligonucleotide
ttttatcctcacatccaatt

SEQ ID NO: 478 - DNA, 20 bp, Artificial sequence
  Synthetic oligonucleotide
gttttatcctcacatccaat

SEQ ID NO: 479 - DNA, 20 bp, Artificial sequence
  Synthetic oligonucleotide
ggttttatcctcacatccaa

SEQ ID NO: 480 - DNA, 20 bp, Artificial sequence
  Synthetic oligonucleotide
gggttttatcctcacatcca

SEQ ID NO: 481 - DNA, 20 bp, Artificial sequence
  Synthetic oligonucleotide
agggttttatcctcacatcc

SEQ ID NO: 482 - DNA, 20 bp, Artificial sequence
  Synthetic oligonucleotide
tagggttttatcctcacatc

SEQ ID NO: 483 - DNA, 20 bp, Artificial sequence
  Synthetic oligonucleotide
ctagggttttatcctcacat

SEQ ID NO: 484 - DNA, 20 bp, Artificial sequence
  Synthetic oligonucleotide
gctagggttttatcctcaca

SEQ ID NO: 485 - DNA, 20 bp, Artificial sequence
  Synthetic oligonucleotide
ggctagggttttatcctcac

SEQ ID NO: 486 - DNA, 20 bp, Artificial sequence
  Synthetic oligonucleotide
aggctagggttttatcctca

SEQ ID NO: 487 - DNA, 20 bp, Artificial sequence
  Synthetic oligonucleotide
aaggctagggttttatcctc

SEQ ID NO: 488 - DNA, 20 bp, Artificial sequence
  Synthetic oligonucleotide
tgaaggctagggttttatcc

SEQ ID NO: 489 - DNA, 20 bp, Artificial sequence
  Synthetic oligonucleotide
ttgaaggctagggttttatc

SEQ ID NO: 490 - DNA, 20 bp, Artificial sequence
  Synthetic oligonucleotide
tttgaaggctagggttttat

SEQ ID NO: 491 - DNA, 20 bp, Artificial sequence
  Synthetic oligonucleotide
ttttgaaggctagggtttta

SEQ ID NO: 492 - DNA, 20 bp, Artificial sequence
  Synthetic oligonucleotide
attttgaaggctagggtttt

SEQ ID NO: 493 - DNA, 20 bp, Artificial sequence
  Synthetic oligonucleotide
cattttgaaggctagggttt

SEQ ID NO: 494 - DNA, 20 bp, Artificial sequence
  Synthetic oligonucleotide
tcattttgaaggctagggtt

SEQ ID NO: 495 - DNA, 20 bp, Artificial sequence
  Synthetic oligonucleotide
ttcattttgaaggctagggt

SEQ ID NO: 496 - DNA, 20 bp, Artificial sequence
  Synthetic oligonucleotide
attcattttgaaggctaggg

SEQ ID NO: 497 - DNA, 20 bp, Artificial sequence
  Synthetic oligonucleotide
cattcattttgaaggctagg

SEQ ID NO: 498 - DNA, 20 bp, Artificial sequence
  Synthetic oligonucleotide
ccattcattttgaaggctag

SEQ ID NO: 499 - DNA, 20 bp, Artificial sequence
  Synthetic oligonucleotide
accattcattttgaaggcta

SEQ ID NO: 500 - DNA, 20 bp, Artificial sequence
  Synthetic oligonucleotide
aaccattcattttgaaggct

SEQ ID NO: 501 - DNA, 20 bp, Artificial sequence
  Synthetic oligonucleotide
taaccattcattttgaaggc

SEQ ID NO: 502 - DNA, 20 bp, Artificial sequence
  Synthetic oligonucleotide
gtaaccattcattttgaagg

SEQ ID NO: 503 - DNA, 20 bp, Artificial sequence
  Synthetic oligonucleotide
tgtaaccattcattttgaag

SEQ ID NO: 504 - DNA, 20 bp, Artificial sequence
  Synthetic oligonucleotide
tatgtaaccattcattttga

SEQ ID NO: 505 - DNA, 20 bp, Artificial sequence
  Synthetic oligonucleotide
atatgtaaccattcattttg

SEQ ID NO: 506 - DNA, 20 bp, Artificial sequence
  Synthetic oligonucleotide
gatatgtaaccattcatttt

SEQ ID NO: 507 - DNA, 20 bp, Artificial sequence
  Synthetic oligonucleotide
ggatatgtaaccattcattt

SEQ ID NO: 508 - DNA, 20 bp, Artificial sequence
  Synthetic oligonucleotide
tggatatgtaaccattcatt

SEQ ID NO: 509 - DNA, 20 bp, Artificial sequence
  Synthetic oligonucleotide
ttggatatgtaaccattcat

SEQ ID NO: 510 - DNA, 20 bp, Artificial sequence
  Synthetic oligonucleotide
attggatatgtaaccattca

SEQ ID NO: 511 - DNA, 20 bp, Artificial sequence
  Synthetic oligonucleotide
cattggatatgtaaccattc

SEQ ID NO: 512 - DNA, 20 bp, Artificial sequence
  Synthetic oligonucleotide
gcattggatatgtaaccatt

SEQ ID NO: 513 - DNA, 20 bp, Artificial sequence
  Synthetic oligonucleotide
tgcattggatatgtaaccat

SEQ ID NO: 514 - DNA, 20 bp, Artificial sequence
  Synthetic oligonucleotide
ttgcattggatatgtaacca

SEQ ID NO: 515 - DNA, 20 bp, Artificial sequence
  Synthetic oligonucleotide
tttgcattggatatgtaacc

SEQ ID NO: 516 - DNA, 20 bp, Artificial sequence
  Synthetic oligonucleotide
gtttgcattggatatgtaac

SEQ ID NO: 517 - DNA, 20 bp, Artificial sequence
  Synthetic oligonucleotide
agtttgcattggatatgtaa

SEQ ID NO: 518 - DNA, 20 bp, Artificial sequence
  Synthetic oligonucleotide
tagtttgcattggatatgta

SEQ ID NO: 519 - DNA, 20 bp, Artificial sequence
  Synthetic oligonucleotide
gtagtttgcattggatatgt

SEQ ID NO: 520 - DNA, 20 bp, Artificial sequence
  Synthetic oligonucleotide
agtagtttgcattggatatg

SEQ ID NO: 521 - DNA, 20 bp, Artificial sequence
  Synthetic oligonucleotide
gagtagtttgcattggatat

SEQ ID NO: 522 - DNA, 20 bp, Artificial sequence
  Synthetic oligonucleotide
tgagtagtttgcattggata

SEQ ID NO: 523 - DNA, 20 bp, Artificial sequence
  Synthetic oligonucleotide
ctgagtagtttgcattggat

SEQ ID NO: 524 - DNA, 20 bp, Artificial sequence
  Synthetic oligonucleotide
actgagtagtttgcattgga

SEQ ID NO: 525 - DNA, 20 bp, Artificial sequence
  Synthetic oligonucleotide
cactgagtagtttgcattgg

SEQ ID NO: 526 - DNA, 20 bp, Artificial sequence
  Synthetic oligonucleotide
tcactgagtagtttgcattg

SEQ ID NO: 527 - DNA, 20 bp, Artificial sequence
  Synthetic oligonucleotide
ttcactgagtagtttgcatt

SEQ ID NO: 528 - DNA, 20 bp, Artificial sequence
  Synthetic oligonucleotide
cttcactgagtagtttgcat

SEQ ID NO: 529 - DNA, 20 bp, Artificial sequence
  Synthetic oligonucleotide
tcttcactgagtagtttgca

SEQ ID NO: 530 - DNA, 20 bp, Artificial sequence
  Synthetic oligonucleotide
ttcttcactgagtagtttgc

SEQ ID NO: 531 - DNA, 20 bp, Artificial sequence
  Synthetic oligonucleotide
cttcttcactgagtagtttg

SEQ ID NO: 532 - DNA, 20 bp, Artificial sequence
  Synthetic oligonucleotide
acttcttcactgagtagttt

SEQ ID NO: 533 - DNA, 20 bp, Artificial sequence
  Synthetic oligonucleotide
cacttcttcactgagtagtt

SEQ ID NO: 534 - DNA, 20 bp, Artificial sequence
  Synthetic oligonucleotide
tgcacttcttcactgagtag

SEQ ID NO: 535 - DNA, 20 bp, Artificial sequence
  Synthetic oligonucleotide
atgcacttcttcactgagta

SEQ ID NO: 536 - DNA, 20 bp, Artificial sequence
  Synthetic oligonucleotide
gatgcacttcttcactgagt

SEQ ID NO: 537 - DNA, 20 bp, Artificial sequence
  Synthetic oligonucleotide
agatgcacttcttcactgag

SEQ ID NO: 538 - DNA, 20 bp, Artificial sequence
  Synthetic oligonucleotide
aagatgcacttcttcactga

SEQ ID NO: 539 - DNA, 20 bp, Artificial sequence
  Synthetic oligonucleotide
gaagagtaagaagatgcact

SEQ ID NO: 540 - DNA, 20 bp, Artificial sequence
  Synthetic oligonucleotide
tgaagagtaagaagatgcac

SEQ ID NO: 541 - DNA, 20 bp, Artificial sequence
  Synthetic oligonucleotide
atgaagagtaagaagatgca

SEQ ID NO: 542 - DNA, 20 bp, Artificial sequence
  Synthetic oligonucleotide
gatgaagagtaagaagatgc

SEQ ID NO: 543 - DNA, 20 bp, Artificial sequence
  Synthetic oligonucleotide
tgatgaagagtaagaagatg

SEQ ID NO: 544 - DNA, 20 bp, Artificial sequence
  Synthetic oligonucleotide
ttgatgaagagtaagaagat

SEQ ID NO: 545 - DNA, 20 bp, Artificial sequence
  Synthetic oligonucleotide
gttgatgaagagtaagaaga

SEQ ID NO: 546 - DNA, 20 bp, Artificial sequence
  Synthetic oligonucleotide
ggttgatgaagagtaagaag

SEQ ID NO: 547 - DNA, 20 bp, Artificial sequence
  Synthetic oligonucleotide
tggttgatgaagagtaagaa

SEQ ID NO: 548 - DNA, 20 bp, Artificial sequence
  Synthetic oligonucleotide
atggttgatgaagagtaaga

SEQ ID NO: 549 - DNA, 20 bp, Artificial sequence
  Synthetic oligonucleotide
gatggttgatgaagagtaag

SEQ ID NO: 550 - DNA, 20 bp, Artificial sequence
  Synthetic oligonucleotide
cgatggttgatgaagagtaa

SEQ ID NO: 551 - DNA, 20 bp, Artificial sequence
  Synthetic oligonucleotide
acgatggttgatgaagagta

SEQ ID NO: 552 - DNA, 20 bp, Artificial sequence
  Synthetic oligonucleotide
gacgatggttgatgaagagt

SEQ ID NO: 553 - DNA, 20 bp, Artificial sequence
  Synthetic oligonucleotide
agacgatggttgatgaagag

SEQ ID NO: 554 - DNA, 20 bp, Artificial sequence
  Synthetic oligonucleotide
cagacgatggttgatgaaga

SEQ ID NO: 555 - DNA, 20 bp, Artificial sequence
  Synthetic oligonucleotide
gttgattctaccagacgatg

SEQ ID NO: 556 - DNA, 20 bp, Artificial sequence
  Synthetic oligonucleotide
agttgattctaccagacgat

SEQ ID NO: 557 - DNA, 20 bp, Artificial sequence
  Synthetic oligonucleotide
aagttgattctaccagacga

SEQ ID NO: 558 - DNA, 20 bp, Artificial sequence
  Synthetic oligonucleotide
gaagttgattctaccagacg

SEQ ID NO: 559 - DNA, 20 bp, Artificial sequence
  Synthetic oligonucleotide
ggaagttgattctaccagac

SEQ ID NO: 560 - DNA, 20 bp, Artificial sequence
  Synthetic oligonucleotide
aggaagttgattctaccaga

SEQ ID NO: 561 - DNA, 20 bp, Artificial sequence
  Synthetic oligonucleotide
aaggaagttgattctaccag

SEQ ID NO: 562 - DNA, 20 bp, Artificial sequence
  Synthetic oligonucleotide
caaggaagttgattctacca

SEQ ID NO: 563 - DNA, 20 bp, Artificial sequence
  Synthetic oligonucleotide
ggcttttctcaaggaagttg

SEQ ID NO: 564 - DNA, 20 bp, Artificial sequence
  Synthetic oligonucleotide
tggcttttctcaaggaagtt

SEQ ID NO: 565 - DNA, 20 bp, Artificial sequence
  Synthetic oligonucleotide
atggcttttctcaaggaagt

SEQ ID NO: 566 - DNA, 20 bp, Artificial sequence
  Synthetic oligonucleotide
tatggcttttctcaaggaag

SEQ ID NO: 567 - DNA, 20 bp, Artificial sequence
  Synthetic oligonucleotide
ctatggcttttctcaaggaa

SEQ ID NO: 568 - DNA, 20 bp, Artificial sequence
  Synthetic oligonucleotide
tctatggcttttctcaagga

SEQ ID NO: 569 - DNA, 20 bp, Artificial sequence
  Synthetic oligonucleotide
ttctatggcttttctcaagg

SEQ ID NO: 570 - DNA, 20 bp, Artificial sequence
  Synthetic oligonucleotide
tttctatggcttttctcaag

SEQ ID NO: 571 - DNA, 20 bp, Artificial sequence
  Synthetic oligonucleotide
gtttctatggcttttctcaa

SEQ ID NO: 572 - DNA, 20 bp, Artificial sequence
  Synthetic oligonucleotide
tgtttctatggcttttctca

SEQ ID NO: 573 - DNA, 20 bp, Artificial sequence
  Synthetic oligonucleotide
ctgtttctatggcttttctc

SEQ ID NO: 574 - DNA, 20 bp, Artificial sequence
  Synthetic oligonucleotide
actgtttctatggcttttct

SEQ ID NO: 575 - DNA, 20 bp, Artificial sequence
  Synthetic oligonucleotide
cactgtttctatggcttttc

SEQ ID NO: 576 - DNA, 20 bp, Artificial sequence
  Synthetic oligonucleotide
acactgtttctatggctttt

SEQ ID NO: 577 - DNA, 20 bp, Artificial sequence
  Synthetic oligonucleotide
tacactgtttctatggcttt

SEQ ID NO: 578 - DNA, 20 bp, Artificial sequence
  Synthetic oligonucleotide
atacactgtttctatggctt

SEQ ID NO: 579 - DNA, 20 bp, Artificial sequence
  Synthetic oligonucleotide
catacactgtttctatggct

SEQ ID NO: 580 - DNA, 20 bp, Artificial sequence
  Synthetic oligonucleotide
gcatacactgtttctatggc

SEQ ID NO: 581 - DNA, 20 bp, Artificial sequence
  Synthetic oligonucleotide
tgcatacactgtttctatgg

SEQ ID NO: 582 - DNA, 20 bp, Artificial sequence
  Synthetic oligonucleotide
ctgcatacactgtttctatg

SEQ ID NO: 583 - DNA, 20 bp, Artificial sequence
  Synthetic oligonucleotide
gctgcatacactgtttctat

SEQ ID NO: 584 - DNA, 20 bp, Artificial sequence
  Synthetic oligonucleotide
ggctgcatacactgtttcta

SEQ ID NO: 585 - DNA, 20 bp, Artificial sequence
  Synthetic oligonucleotide
aggctgcatacactgtttct

SEQ ID NO: 586 - DNA, 20 bp, Artificial sequence
  Synthetic oligonucleotide
taggctgcatacactgtttc

SEQ ID NO: 587 - DNA, 20 bp, Artificial sequence
  Synthetic oligonucleotide
ataggctgcatacactgttt

SEQ ID NO: 588 - DNA, 20 bp, Artificial sequence
  Synthetic oligonucleotide
aataggctgcatacactgtt

SEQ ID NO: 589 - DNA, 20 bp, Artificial sequence
  Synthetic oligonucleotide
aaataggctgcatacactgt

SEQ ID NO: 590 - DNA, 20 bp, Artificial sequence
  Synthetic oligonucleotide
caaataggctgcatacactg

SEQ ID NO: 591 - DNA, 20 bp, Artificial sequence
  Synthetic oligonucleotide
tgtgtttttgggcaaatagg

SEQ ID NO: 592 - DNA, 20 bp, Artificial sequence
  Synthetic oligonucleotide
gtgtgtttttgggcaaatag

SEQ ID NO: 593 - DNA, 20 bp, Artificial sequence
  Synthetic oligonucleotide
tgtgtgtttttgggcaaata

SEQ ID NO: 594 - DNA, 20 bp, Artificial sequence
  Synthetic oligonucleotide
gtgtgtgtttttgggcaaat

SEQ ID NO: 595 - DNA, 20 bp, Artificial sequence
  Synthetic oligonucleotide
ggtgtgtgtttttgggcaaa

SEQ ID NO: 596 - DNA, 20 bp, Artificial sequence
  Synthetic oligonucleotide
gggtgtgtgtttttgggcaa

SEQ ID NO: 597 - DNA, 20 bp, Artificial sequence
  Synthetic oligonucleotide
tgggtgtgtgtttttgggca

SEQ ID NO: 598 - DNA, 20 bp, Artificial sequence
  Synthetic oligonucleotide
atgggtgtgtgtttttgggc

SEQ ID NO: 599 - DNA, 20 bp, Artificial sequence
  Synthetic oligonucleotide
aatgggtgtgtgtttttggg

SEQ ID NO: 600 - DNA, 20 bp, Artificial sequence
  Synthetic oligonucleotide
gaatgggtgtgtgtttttgg

SEQ ID NO: 601 - DNA, 20 bp, Artificial sequence
  Synthetic oligonucleotide
ggaatgggtgtgtgtttttg

SEQ ID NO: 602 - DNA, 20 bp, Artificial sequence
  Synthetic oligonucleotide
aggaatgggtgtgtgttttt

SEQ ID NO: 603 - DNA, 20 bp, Artificial sequence
  Synthetic oligonucleotide
caggaatgggtgtgtgtttt

SEQ ID NO: 604 - DNA, 20 bp, Artificial sequence
  Synthetic oligonucleotide
acaggaatgggtgtgtgttt

SEQ ID NO: 605 - DNA, 20 bp, Artificial sequence
  Synthetic oligonucleotide
tacaggaatgggtgtgtgtt

SEQ ID NO: 606 - DNA, 20 bp, Artificial sequence
  Synthetic oligonucleotide
gtacaggaatgggtgtgtgt

SEQ ID NO: 607 - DNA, 20 bp, Artificial sequence
  Synthetic oligonucleotide
ggtacaggaatgggtgtgtg

SEQ ID NO: 608 - DNA, 20 bp, Artificial sequence
  Synthetic oligonucleotide
aggtacaggaatgggtgtgt

SEQ ID NO: 609 - DNA, 20 bp, Artificial sequence
  Synthetic oligonucleotide
gaggtacaggaatgggtgtg

SEQ ID NO: 610 - DNA, 20 bp, Artificial sequence
  Synthetic oligonucleotide
tgaggtacaggaatgggtgt

SEQ ID NO: 611 - DNA, 20 bp, Artificial sequence
  Synthetic oligonucleotide
gatttctaaactgaggtaca

SEQ ID NO: 612 - DNA, 20 bp, Artificial sequence
  Synthetic oligonucleotide
tgatttctaaactgaggtac

SEQ ID NO: 613 - DNA, 20 bp, Artificial sequence
  Synthetic oligonucleotide
ctgatttctaaactgaggta

SEQ ID NO: 614 - DNA, 20 bp, Artificial sequence
  Synthetic oligonucleotide
actgatttctaaactgaggt

SEQ ID NO: 615 - DNA, 20 bp, Artificial sequence
  Synthetic oligonucleotide
gactgatttctaaactgagg

SEQ ID NO: 616 - DNA, 20 bp, Artificial sequence
  Synthetic oligonucleotide
ggactgatttctaaactgag

SEQ ID NO: 617 - DNA, 20 bp, Artificial sequence
  Synthetic oligonucleotide
gggactgatttctaaactga

SEQ ID NO: 618 - DNA, 20 bp, Artificial sequence
  Synthetic oligonucleotide
acattaacatccacattctg

SEQ ID NO: 619 - DNA, 20 bp, Artificial sequence
  Synthetic oligonucleotide
cacattaacatccacattct

SEQ ID NO: 620 - DNA, 20 bp, Artificial sequence
  Synthetic oligonucleotide
gcacattaacatccacattc

SEQ ID NO: 621 - DNA, 20 bp, Artificial sequence
  Synthetic oligonucleotide
tgcacattaacatccacatt

SEQ ID NO: 622 - DNA, 20 bp, Artificial sequence
  Synthetic oligonucleotide
gtgcacattaacatccacat

SEQ ID NO: 623 - DNA, 20 bp, Artificial sequence
  Synthetic oligonucleotide
ggtgcacattaacatccaca

SEQ ID NO: 624 - DNA, 20 bp, Artificial sequence
  Synthetic oligonucleotide
gggtgcacattaacatccac

SEQ ID NO: 625 - DNA, 20 bp, Artificial sequence
  Synthetic oligonucleotide
tgaacttcatgctttgtggg

SEQ ID NO: 626 - DNA, 20 bp, Artificial sequence
  Synthetic oligonucleotide
gtgaacttcatgctttgtgg

SEQ ID NO: 627 - DNA, 20 bp, Artificial sequence
  Synthetic oligonucleotide
agtgaacttcatgctttgtg

SEQ ID NO: 628 - DNA, 20 bp, Artificial sequence
  Synthetic oligonucleotide
aagtgaacttcatgctttgt

SEQ ID NO: 629 - DNA, 20 bp, Artificial sequence
  Synthetic oligonucleotide
ttgctctcgatgtgctgctg

SEQ ID NO: 630 - DNA, 20 bp, Artificial sequence
  Synthetic oligonucleotide
cttgctctcgatgtgctgct

SEQ ID NO: 631 - DNA, 20 bp, Artificial sequence
  Synthetic oligonucleotide
agcttgctctcgatgtgctg

SEQ ID NO: 632 - DNA, 20 bp, Artificial sequence
  Synthetic oligonucleotide
gagcttgctctcgatgtgct

SEQ ID NO: 633 - DNA, 20 bp, Artificial sequence
  Synthetic oligonucleotide
aggagcttgctctcgatgtg

SEQ ID NO: 634 - DNA, 20 bp, Artificial sequence
  Synthetic oligonucleotide
caggagcttgctctcgatgt

SEQ ID NO: 635 - DNA, 20 bp, Artificial sequence
  Synthetic oligonucleotide
ggtgaagtacatcctggagg

SEQ ID NO: 636 - DNA, 20 bp, Artificial sequence
  Synthetic oligonucleotide
aagtctgggtgaagtacatc

SEQ ID NO: 637 - DNA, 20 bp, Artificial sequence
  Synthetic oligonucleotide
aaagtctgggtgaagtacat

SEQ ID NO: 638 - DNA, 20 bp, Artificial sequence
  Synthetic oligonucleotide
caaagtctgggtgaagtaca

SEQ ID NO: 639 - DNA, 20 bp, Artificial sequence
  Synthetic oligonucleotide
gcaaagtctgggtgaagtac

SEQ ID NO: 640 - DNA, 20 bp, Artificial sequence
  Synthetic oligonucleotide
agcaaagtctgggtgaagta

SEQ ID NO: 641 - DNA, 20 bp, Artificial sequence
  Synthetic oligonucleotide
tagcaaagtctgggtgaagt

SEQ ID NO: 642 - DNA, 20 bp, Artificial sequence
  Synthetic oligonucleotide
gtagcaaagtctgggtgaag

SEQ ID NO: 643 - DNA, 20 bp, Artificial sequence
  Synthetic oligonucleotide
ggtagcaaagtctgggtgaa

SEQ ID NO: 644 - DNA, 20 bp, Artificial sequence
  Synthetic oligonucleotide
tggtagcaaagtctgggtga

SEQ ID NO: 645 - DNA, 20 bp, Artificial sequence
  Synthetic oligonucleotide
ctggtagcaaagtctgggtg

SEQ ID NO: 646 - DNA, 20 bp, Artificial sequence
  Synthetic oligonucleotide
cctggtagcaaagtctgggt

SEQ ID NO: 647 - DNA, 20 bp, Artificial sequence
  Synthetic oligonucleotide
tcctggtagcaaagtctggg

SEQ ID NO: 648 - DNA, 20 bp, Artificial sequence
  Synthetic oligonucleotide
gtcctggtagcaaagtctgg

SEQ ID NO: 649 - DNA, 20 bp, Artificial sequence
  Synthetic oligonucleotide
agtcctggtagcaaagtctg

SEQ ID NO: 650 - DNA, 20 bp, Artificial sequence
  Synthetic oligonucleotide
aagtcctggtagcaaagtct

SEQ ID NO: 651 - DNA, 20 bp, Artificial sequence
  Synthetic oligonucleotide
caagtcctggtagcaaagtc

SEQ ID NO: 652 - DNA, 20 bp, Artificial sequence
  Synthetic oligonucleotide
gcaagtcctggtagcaaagt

SEQ ID NO: 653 - DNA, 20 bp, Artificial sequence
  Synthetic oligonucleotide
agcaagtcctggtagcaaag

SEQ ID NO: 654 - DNA, 20 bp, Artificial sequence
  Synthetic oligonucleotide
cagcaagtcctggtagcaaa

SEQ ID NO: 655 - DNA, 20 bp, Artificial sequence
  Synthetic oligonucleotide
gatttaaccatctccccaga

SEQ ID NO: 656 - DNA, 20 bp, Artificial sequence
  Synthetic oligonucleotide
ggatttaaccatctccccag

SEQ ID NO: 657 - DNA, 20 bp, Artificial sequence
  Synthetic oligonucleotide
tggatttaaccatctcccca

SEQ ID NO: 658 - DNA, 20 bp, Artificial sequence
  Synthetic oligonucleotide
gacttgttgtggatttaacc

SEQ ID NO: 659 - DNA, 20 bp, Artificial sequence
  Synthetic oligonucleotide
agacttgttgtggatttaac

SEQ ID NO: 660 - DNA, 20 bp, Artificial sequence
  Synthetic oligonucleotide
cagacttgttgtggatttaa

SEQ ID NO: 661 - DNA, 20 bp, Artificial sequence
  Synthetic oligonucleotide
tcagacttgttgtggattta

SEQ ID NO: 662 - DNA, 20 bp, Artificial sequence
  Synthetic oligonucleotide
gtcagacttgttgtggattt

SEQ ID NO: 663 - DNA, 20 bp, Artificial sequence
  Synthetic oligonucleotide
ggtcagacttgttgtggatt

SEQ ID NO: 664 - DNA, 20 bp, Artificial sequence
  Synthetic oligonucleotide
aggtcagacttgttgtggat

SEQ ID NO: 665 - DNA, 20 bp, Artificial sequence
  Synthetic oligonucleotide
gaggtcagacttgttgtgga

SEQ ID NO: 666 - DNA, 20 bp, Artificial sequence
  Synthetic oligonucleotide
cgaggtcagacttgttgtgg

SEQ ID NO: 667 - DNA, 20 bp, Artificial sequence
  Synthetic oligonucleotide
acgaggtcagacttgttgtg

SEQ ID NO: 668 - DNA, 20 bp, Artificial sequence
  Synthetic oligonucleotide
gacgaggtcagacttgttgt

SEQ ID NO: 669 - DNA, 20 bp, Artificial sequence
  Synthetic oligonucleotide
agacgaggtcagacttgttg

SEQ ID NO: 670 - DNA, 20 bp, Artificial sequence
  Synthetic oligonucleotide
aagacgaggtcagacttgtt

SEQ ID NO: 671 - DNA, 20 bp, Artificial sequence
  Synthetic oligonucleotide
gaagacgaggtcagacttgt

SEQ ID NO: 672 - DNA, 20 bp, Artificial sequence
  Synthetic oligonucleotide
agaagacgaggtcagacttg

SEQ ID NO: 673 - DNA, 20 bp, Artificial sequence
  Synthetic oligonucleotide
tagaagacgaggtcagactt

SEQ ID NO: 674 - DNA, 20 bp, Artificial sequence
  Synthetic oligonucleotide
gtagaagacgaggtcagact

SEQ ID NO: 675 - DNA, 20 bp, Artificial sequence
  Synthetic oligonucleotide
agtagaagacgaggtcagac

SEQ ID NO: 676 - DNA, 20 bp, Artificial sequence
  Synthetic oligonucleotide
aagtagaagacgaggtcaga

SEQ ID NO: 677 - DNA, 20 bp, Artificial sequence
  Synthetic oligonucleotide
gaagtagaagacgaggtcag

SEQ ID NO: 678 - DNA, 20 bp, Artificial sequence
  Synthetic oligonucleotide
agaagtagaagacgaggtca

SEQ ID NO: 679 - DNA, 20 bp, Artificial sequence
  Synthetic oligonucleotide
cagaagtagaagacgaggtc

SEQ ID NO: 680 - DNA, 20 bp, Artificial sequence
  Synthetic oligonucleotide
ccagaagtagaagacgaggt

SEQ ID NO: 681 - DNA, 20 bp, Artificial sequence
  Synthetic oligonucleotide
tccagaagtagaagacgagg

SEQ ID NO: 682 - DNA, 20 bp, Artificial sequence
  Synthetic oligonucleotide
ttccagaagtagaagacgag

SEQ ID NO: 683 - DNA, 20 bp, Artificial sequence
  Synthetic oligonucleotide
ccttatcactacttccagaa

SEQ ID NO: 684 - DNA, 20 bp, Artificial sequence
  Synthetic oligonucleotide
accttatcactacttccaga

SEQ ID NO: 685 - DNA, 20 bp, Artificial sequence
  Synthetic oligonucleotide
gaccttatcactacttccag

SEQ ID NO: 686 - DNA, 20 bp, Artificial sequence
  Synthetic oligonucleotide
agaccttatcactacttcca

SEQ ID NO: 687 - DNA, 20 bp, Artificial sequence
  Synthetic oligonucleotide
tagaccttatcactacttcc

SEQ ID NO: 688 - DNA, 20 bp, Artificial sequence
  Synthetic oligonucleotide
atagaccttatcactacttc

SEQ ID NO: 689 - DNA, 20 bp, Artificial sequence
  Synthetic oligonucleotide
catagaccttatcactactt

SEQ ID NO: 690 - DNA, 20 bp, Artificial sequence
  Synthetic oligonucleotide
gcatagaccttatcactact

SEQ ID NO: 691 - DNA, 20 bp, Artificial sequence
  Synthetic oligonucleotide
ggcatagaccttatcactac

SEQ ID NO: 692 - DNA, 20 bp, Artificial sequence
  Synthetic oligonucleotide
gggcatagaccttatcacta

SEQ ID NO: 693 - DNA, 20 bp, Artificial sequence
  Synthetic oligonucleotide
tgggcatagaccttatcact

SEQ ID NO: 694 - DNA, 20 bp, Artificial sequence
  Synthetic oligonucleotide
gtgggcatagaccttatcac

SEQ ID NO: 695 - DNA, 20 bp, Artificial sequence
  Synthetic oligonucleotide
ggtgggcatagaccttatca

SEQ ID NO: 696 - DNA, 20 bp, Artificial sequence
  Synthetic oligonucleotide
tggtgggcatagaccttatc

SEQ ID NO: 697 - DNA, 20 bp, Artificial sequence
  Synthetic oligonucleotide
ctggtgggcatagaccttat

SEQ ID NO: 698 - DNA, 20 bp, Artificial sequence
  Synthetic oligonucleotide
tctggtgggcatagacctta

SEQ ID NO: 699 - DNA, 20 bp, Artificial sequence
  Synthetic oligonucleotide
atctggtgggcatagacctt

SEQ ID NO: 700 - DNA, 20 bp, Artificial sequence
  Synthetic oligonucleotide
catctggtgggcatagacct

SEQ ID NO: 701 - DNA, 20 bp, Artificial sequence
  Synthetic oligonucleotide
gaatctgtacgaaccatctg

SEQ ID NO: 702 - DNA, 20 bp, Artificial sequence
  Synthetic oligonucleotide
ggaatctgtacgaaccatct

SEQ ID NO: 703 - DNA, 20 bp, Artificial sequence
  Synthetic oligonucleotide
gggaatctgtacgaaccatc

SEQ ID NO: 704 - DNA, 20 bp, Artificial sequence
  Synthetic oligonucleotide
cgggaatctgtacgaaccat

SEQ ID NO: 705 - DNA, 20 bp, Artificial sequence
  Synthetic oligonucleotide
ccgggaatctgtacgaacca

SEQ ID NO: 706 - DNA, 20 bp, Artificial sequence
  Synthetic oligonucleotide
tcccgggaatctgtacgaac

SEQ ID NO: 707 - DNA, 20 bp, Artificial sequence
  Synthetic oligonucleotide
tcaagcttctgttcccggga

SEQ ID NO: 708 - DNA, 20 bp, Artificial sequence
  Synthetic oligonucleotide
atcaagcttctgttcccggg

SEQ ID NO: 709 - DNA, 20 bp, Artificial sequence
  Synthetic oligonucleotide
catcaagcttctgttcccgg

SEQ ID NO: 710 - DNA, 20 bp, Artificial sequence
  Synthetic oligonucleotide
ctcagaggctgcagaaatgc

SEQ ID NO: 711 - DNA, 20 bp, Artificial sequence
  Synthetic oligonucleotide
gctcagaggctgcagaaatg

SEQ ID NO: 712 - DNA, 20 bp, Artificial sequence
  Synthetic oligonucleotide
tgctcagaggctgcagaaat

SEQ ID NO: 713 - DNA, 20 bp, Artificial sequence
  Synthetic oligonucleotide
ttgctcagaggctgcagaaa

SEQ ID NO: 714 - DNA, 20 bp, Artificial sequence
  Synthetic oligonucleotide
tttgctcagaggctgcagaa

SEQ ID NO: 715 - DNA, 20 bp, Artificial sequence
  Synthetic oligonucleotide
gtttgctcagaggctgcaga

SEQ ID NO: 716 - DNA, 20 bp, Artificial sequence
  Synthetic oligonucleotide
tcctctgtgacaatggcctg

SEQ ID NO: 717 - DNA, 20 bp, Artificial sequence
  Synthetic oligonucleotide
atcctctgtgacaatggcct

SEQ ID NO: 718 - DNA, 20 bp, Artificial sequence
  Synthetic oligonucleotide
tatcctctgtgacaatggcc

SEQ ID NO: 719 - DNA, 20 bp, Artificial sequence
  Synthetic oligonucleotide
ttatcctctgtgacaatggc

SEQ ID NO: 720 - DNA, 20 bp, Artificial sequence
  Synthetic oligonucleotide
cttatcctctgtgacaatgg

SEQ ID NO: 721 - DNA, 20 bp, Artificial sequence
  Synthetic oligonucleotide
tcttatcctctgtgacaatg

SEQ ID NO: 722 - DNA, 20 bp, Artificial sequence
  Synthetic oligonucleotide
gtcttatcctctgtgacaat

SEQ ID NO: 723 - DNA, 20 bp, Artificial sequence
  Synthetic oligonucleotide
tgtcttatcctctgtgacaa

SEQ ID NO: 724 - DNA, 20 bp, Artificial sequence
  Synthetic oligonucleotide
ctgtcttatcctctgtgaca

SEQ ID NO: 725 - DNA, 20 bp, Artificial sequence
  Synthetic oligonucleotide
tctgtcttatcctctgtgac

SEQ ID NO: 726 - DNA, 20 bp, Artificial sequence
  Synthetic oligonucleotide
atctgtcttatcctctgtga

SEQ ID NO: 727 - DNA, 20 bp, Artificial sequence
  Synthetic oligonucleotide
tatctgtcttatcctctgtg

SEQ ID NO: 728 - DNA, 20 bp, Artificial sequence
  Synthetic oligonucleotide
atatctgtcttatcctctgt

SEQ ID NO: 729 - DNA, 20 bp, Artificial sequence
  Synthetic oligonucleotide
aatatctgtcttatcctctg

SEQ ID NO: 730 - DNA, 20 bp, Artificial sequence
  Synthetic oligonucleotide
aaatatctgtcttatcctct

SEQ ID NO: 731 - DNA, 20 bp, Artificial sequence
  Synthetic oligonucleotide
gaaatatctgtcttatcctc

SEQ ID NO: 732 - DNA, 20 bp, Artificial sequence
  Synthetic oligonucleotide
agaaatatctgtcttatcct

SEQ ID NO: 733 - DNA, 20 bp, Artificial sequence
  Synthetic oligonucleotide
tagaaatatctgtcttatcc

SEQ ID NO: 734 - DNA, 20 bp, Artificial sequence
  Synthetic oligonucleotide
ctagaaatatctgtcttatc

SEQ ID NO: 735 - DNA, 20 bp, Artificial sequence
  Synthetic oligonucleotide
actagaaatatctgtcttat

SEQ ID NO: 736 - DNA, 20 bp, Artificial sequence
  Synthetic oligonucleotide
cactagaaatatctgtctta

SEQ ID NO: 737 - DNA, 20 bp, Artificial sequence
  Synthetic oligonucleotide
ccactagaaatatctgtctt

SEQ ID NO: 738 - DNA, 20 bp, Artificial sequence
  Synthetic oligonucleotide
gccactagaaatatctgtct

SEQ ID NO: 739 - DNA, 20 bp, Artificial sequence
  Synthetic oligonucleotide
tgccactagaaatatctgtc

SEQ ID NO: 740 - DNA, 20 bp, Artificial sequence
  Synthetic oligonucleotide
ctgccactagaaatatctgt

SEQ ID NO: 741 - DNA, 20 bp, Artificial sequence
  Synthetic oligonucleotide
cctgccactagaaatatctg

SEQ ID NO: 742 - DNA, 20 bp, Artificial sequence
  Synthetic oligonucleotide
gccctgccactagaaatatc

SEQ ID NO: 743 - DNA, 20 bp, Artificial sequence
  Synthetic oligonucleotide
agccctgccactagaaatat

SEQ ID NO: 744 - DNA, 20 bp, Artificial sequence
  Synthetic oligonucleotide
tagccctgccactagaaata

SEQ ID NO: 745 - DNA, 20 bp, Artificial sequence
  Synthetic oligonucleotide
ctagccctgccactagaaat

SEQ ID NO: 746 - DNA, 20 bp, Artificial sequence
  Synthetic oligonucleotide
cctagccctgccactagaaa

SEQ ID NO: 747 - DNA, 20 bp, Artificial sequence
  Synthetic oligonucleotide
ctcctcatcttgctgcctag

SEQ ID NO: 748 - DNA, 20 bp, Artificial sequence
  Synthetic oligonucleotide
tctcctcatcttgctgccta

SEQ ID NO: 749 - DNA, 20 bp, Artificial sequence
  Synthetic oligonucleotide
atctcctcatcttgctgcct

SEQ ID NO: 750 - DNA, 20 bp, Artificial sequence
  Synthetic oligonucleotide
catctcctcatcttgctgcc

SEQ ID NO: 751 - DNA, 20 bp, Artificial sequence
  Synthetic oligonucleotide
gcatctcctcatcttgctgc

SEQ ID NO: 752 - DNA, 20 bp, Artificial sequence
  Synthetic oligonucleotide
caagcatctcctcatcttgc

SEQ ID NO: 753 - DNA, 20 bp, Artificial sequence
  Synthetic oligonucleotide
tcaagcatctcctcatcttg

SEQ ID NO: 754 - DNA, 20 bp, Artificial sequence
  Synthetic oligonucleotide
ttcaagcatctcctcatctt

SEQ ID NO: 755 - DNA, 20 bp, Artificial sequence
  Synthetic oligonucleotide
gttcaagcatctcctcatct

SEQ ID NO: 756 - DNA, 20 bp, Artificial sequence
  Synthetic oligonucleotide
agttcaagcatctcctcatc

SEQ ID NO: 757 - DNA, 20 bp, Artificial sequence
  Synthetic oligonucleotide
gagttcaagcatctcctcat

SEQ ID NO: 758 - DNA, 20 bp, Artificial sequence
  Synthetic oligonucleotide
gctgggagttcaagcatctc

SEQ ID NO: 759 - DNA, 20 bp, Artificial sequence
  Synthetic oligonucleotide
ggctgggagttcaagcatct

SEQ ID NO: 760 - DNA, 20 bp, Artificial sequence
  Synthetic oligonucleotide
tttggcagccacttcagcag

SEQ ID NO: 761 - DNA, 20 bp, Artificial sequence
  Synthetic oligonucleotide
ttttggcagccacttcagca

SEQ ID NO: 762 - DNA, 20 bp, Artificial sequence
  Synthetic oligonucleotide
tttttggcagccacttcagc

SEQ ID NO: 763 - DNA, 20 bp, Artificial sequence
  Synthetic oligonucleotide
atttttggcagccacttcag

SEQ ID NO: 764 - DNA, 20 bp, Artificial sequence
  Synthetic oligonucleotide
gatttttggcagccacttca

SEQ ID NO: 765 - DNA, 20 bp, Artificial sequence
  Synthetic oligonucleotide
tgatttttggcagccacttc

SEQ ID NO: 766 - DNA, 20 bp, Artificial sequence
  Synthetic oligonucleotide
ctgatttttggcagccactt

SEQ ID NO: 767 - DNA, 20 bp, Artificial sequence
  Synthetic oligonucleotide
tctgatttttggcagccact

SEQ ID NO: 768 - DNA, 20 bp, Artificial sequence
  Synthetic oligonucleotide
ctctgatttttggcagccac

SEQ ID NO: 769 - DNA, 20 bp, Artificial sequence
  Synthetic oligonucleotide
gctctgatttttggcagcca

SEQ ID NO: 770 - DNA, 20 bp, Artificial sequence
  Synthetic oligonucleotide
agctctgatttttggcagcc

SEQ ID NO: 771 - DNA, 20 bp, Artificial sequence
  Synthetic oligonucleotide
aagctctgatttttggcagc

SEQ ID NO: 772 - DNA, 20 bp, Artificial sequence
  Synthetic oligonucleotide
caagctctgatttttggcag

SEQ ID NO: 773 - DNA, 20 bp, Artificial sequence
  Synthetic oligonucleotide
ccaagctctgatttttggca

SEQ ID NO: 774 - DNA, 20 bp, Artificial sequence
  Synthetic oligonucleotide
cctccaagctctgatttttg

SEQ ID NO: 775 - DNA, 20 bp, Artificial sequence
  Synthetic oligonucleotide
ccctccaagctctgattttt

SEQ ID NO: 776 - DNA, 20 bp, Artificial sequence
  Synthetic oligonucleotide
cccctccaagctctgatttt

SEQ ID NO: 777 - DNA, 20 bp, Artificial sequence
  Synthetic oligonucleotide
ccccctccaagctctgattt

SEQ ID NO: 778 - DNA, 20 bp, Artificial sequence
  Synthetic oligonucleotide
tccccctccaagctctgatt

SEQ ID NO: 779 - DNA, 20 bp, Artificial sequence
  Synthetic oligonucleotide
atccccctccaagctctgat

SEQ ID NO: 780 - DNA, 20 bp, Artificial sequence
  Synthetic oligonucleotide
tatccccctccaagctctga

SEQ ID NO: 781 - DNA, 20 bp, Artificial sequence
  Synthetic oligonucleotide
tgtatccccctccaagctct

SEQ ID NO: 782 - DNA, 20 bp, Artificial sequence
  Synthetic oligonucleotide
ttgtatccccctccaagctc

SEQ ID NO: 783 - DNA, 20 bp, Artificial sequence
  Synthetic oligonucleotide
gttgtatccccctccaagct

SEQ ID NO: 784 - DNA, 20 bp, Artificial sequence
  Synthetic oligonucleotide
tgttgtatccccctccaagc

SEQ ID NO: 785 - DNA, 20 bp, Artificial sequence
  Synthetic oligonucleotide
ttgttgtatccccctccaag

SEQ ID NO: 786 - DNA, 20 bp, Artificial sequence
  Synthetic oligonucleotide
tttgttgtatccccctccaa

SEQ ID NO: 787 - DNA, 20 bp, Artificial sequence
  Synthetic oligonucleotide
ctttgttgtatccccctcca

SEQ ID NO: 788 - DNA, 20 bp, Artificial sequence
  Synthetic oligonucleotide
cctttgttgtatccccctcc

SEQ ID NO: 789 - DNA, 20 bp, Artificial sequence
  Synthetic oligonucleotide
ccctttgttgtatccccctc

SEQ ID NO: 790 - DNA, 20 bp, Artificial sequence
  Synthetic oligonucleotide
cccctttgttgtatccccct

SEQ ID NO: 791 - DNA, 20 bp, Artificial sequence
  Synthetic oligonucleotide
tcccctttgttgtatccccc

SEQ ID NO: 792 - DNA, 20 bp, Artificial sequence
  Synthetic oligonucleotide
gtcccctttgttgtatcccc

SEQ ID NO: 793 - DNA, 20 bp, Artificial sequence
  Synthetic oligonucleotide
agtcccctttgttgtatccc

SEQ ID NO: 794 - DNA, 20 bp, Artificial sequence
  Synthetic oligonucleotide
aagtcccctttgttgtatcc

SEQ ID NO: 795 - DNA, 20 bp, Artificial sequence
  Synthetic oligonucleotide
gaagtcccctttgttgtatc

SEQ ID NO: 796 - DNA, 20 bp, Artificial sequence
  Synthetic oligonucleotide
tgaagtcccctttgttgtat

SEQ ID NO: 797 - DNA, 20 bp, Artificial sequence
  Synthetic oligonucleotide
ctgaagtcccctttgttgta

SEQ ID NO: 798 - DNA, 20 bp, Artificial sequence
  Synthetic oligonucleotide
tctgaagtcccctttgttgt

SEQ ID NO: 799 - DNA, 20 bp, Artificial sequence
  Synthetic oligonucleotide
ttctgaagtcccctttgttg

SEQ ID NO: 800 - DNA, 20 bp, Artificial sequence
  Synthetic oligonucleotide
tttctgaagtcccctttgtt

SEQ ID NO: 801 - DNA, 20 bp, Artificial sequence
  Synthetic oligonucleotide
atttctgaagtcccctttgt

SEQ ID NO: 802 - DNA, 20 bp, Artificial sequence
  Synthetic oligonucleotide
catttctgaagtcccctttg

SEQ ID NO: 803 - DNA, 20 bp, Artificial sequence
  Synthetic oligonucleotide
acatttctgaagtccccttt

SEQ ID NO: 804 - DNA, 20 bp, Artificial sequence
  Synthetic oligonucleotide
gacatttctgaagtcccctt

SEQ ID NO: 805 - DNA, 20 bp, Artificial sequence
  Synthetic oligonucleotide
tgacatttctgaagtcccct

SEQ ID NO: 806 - DNA, 20 bp, Artificial sequence
  Synthetic oligonucleotide
ctgacatttctgaagtcccc

SEQ ID NO: 807 - DNA, 20 bp, Artificial sequence
  Synthetic oligonucleotide
tctgacatttctgaagtccc

SEQ ID NO: 808 - DNA, 20 bp, Artificial sequence
  Synthetic oligonucleotide
ctctgacatttctgaagtcc

SEQ ID NO: 809 - DNA, 20 bp, Artificial sequence
  Synthetic oligonucleotide
tctctgacatttctgaagtc

SEQ ID NO: 810 - DNA, 20 bp, Artificial sequence
  Synthetic oligonucleotide
ttctctgacatttctgaagt

SEQ ID NO: 811 - DNA, 20 bp, Artificial sequence
  Synthetic oligonucleotide
cttctctgacatttctgaag

SEQ ID NO: 812 - DNA, 20 bp, Artificial sequence
  Synthetic oligonucleotide
tcttctctgacatttctgaa

SEQ ID NO: 813 - DNA, 20 bp, Artificial sequence
  Synthetic oligonucleotide
ctcttctctgacatttctga

SEQ ID NO: 814 - DNA, 20 bp, Artificial sequence
  Synthetic oligonucleotide
tctcttctctgacatttctg

SEQ ID NO: 815 - DNA, 20 bp, Artificial sequence
  Synthetic oligonucleotide
ctctcttctctgacatttct

SEQ ID NO: 816 - DNA, 20 bp, Artificial sequence
  Synthetic oligonucleotide
cctctcttctctgacatttc

SEQ ID NO: 817 - DNA, 20 bp, Artificial sequence
  Synthetic oligonucleotide
tcctctcttctctgacattt

SEQ ID NO: 818 - DNA, 20 bp, Artificial sequence
  Synthetic oligonucleotide
gtcctctcttctctgacatt

SEQ ID NO: 819 - DNA, 20 bp, Artificial sequence
  Synthetic oligonucleotide
ggtcctctcttctctgacat

SEQ ID NO: 820 - DNA, 20 bp, Artificial sequence
  Synthetic oligonucleotide
aggtcctctcttctctgaca

SEQ ID NO: 821 - DNA, 20 bp, Artificial sequence
  Synthetic oligonucleotide
taggtcctctcttctctgac

SEQ ID NO: 822 - DNA, 20 bp, Artificial sequence
  Synthetic oligonucleotide
gtaggtcctctcttctctga

SEQ ID NO: 823 - DNA, 20 bp, Artificial sequence
  Synthetic oligonucleotide
agtaggtcctctcttctctg

SEQ ID NO: 824 - DNA, 20 bp, Artificial sequence
  Synthetic oligonucleotide
aagtaggtcctctcttctct

SEQ ID NO: 825 - DNA, 20 bp, Artificial sequence
  Synthetic oligonucleotide
gaagtaggtcctctcttctc

SEQ ID NO: 826 - DNA, 20 bp, Artificial sequence
  Synthetic oligonucleotide
ggaagtaggtcctctcttct

SEQ ID NO: 827 - DNA, 20 bp, Artificial sequence
  Synthetic oligonucleotide
tcccgatgtctctttctggg

SEQ ID NO: 828 - DNA, 20 bp, Artificial sequence
  Synthetic oligonucleotide
ttcccgatgtctctttctgg

SEQ ID NO: 829 - DNA, 20 bp, Artificial sequence
  Synthetic oligonucleotide
cttcccgatgtctctttctg

SEQ ID NO: 830 - DNA, 20 bp, Artificial sequence
  Synthetic oligonucleotide
tcttcccgatgtctctttct

SEQ ID NO: 831 - DNA, 20 bp, Artificial sequence
  Synthetic oligonucleotide
atcttcccgatgtctctttc

SEQ ID NO: 832 - DNA, 20 bp, Artificial sequence
  Synthetic oligonucleotide
aatcttcccgatgtctcttt

SEQ ID NO: 833 - DNA, 20 bp, Artificial sequence
  Synthetic oligonucleotide
gaatcttcccgatgtctctt

SEQ ID NO: 834 - DNA, 20 bp, Artificial sequence
  Synthetic oligonucleotide
agaatcttcccgatgtctct

SEQ ID NO: 835 - DNA, 20 bp, Artificial sequence
  Synthetic oligonucleotide
cagaatcttcccgatgtctc

SEQ ID NO: 836 - DNA, 20 bp, Artificial sequence
  Synthetic oligonucleotide
tcagaatcttcccgatgtct

SEQ ID NO: 837 - DNA, 20 bp, Artificial sequence
  Synthetic oligonucleotide
atcagaatcttcccgatgtc

SEQ ID NO: 838 - DNA, 20 bp, Artificial sequence
  Synthetic oligonucleotide
catcagaatcttcccgatgt

SEQ ID NO: 839 - DNA, 20 bp, Artificial sequence
  Synthetic oligonucleotide
cacatcagaatcttcccgat

SEQ ID NO: 840 - DNA, 20 bp, Artificial sequence
  Synthetic oligonucleotide
ccacatcagaatcttcccga

SEQ ID NO: 841 - DNA, 20 bp, Artificial sequence
  Synthetic oligonucleotide
tccacatcagaatcttcccg

SEQ ID NO: 842 - DNA, 20 bp, Artificial sequence
  Synthetic oligonucleotide
ttccacatcagaatcttccc

SEQ ID NO: 843 - DNA, 20 bp, Artificial sequence
  Synthetic oligonucleotide
tttccacatcagaatcttcc

SEQ ID NO: 844 - DNA, 20 bp, Artificial sequence
  Synthetic oligonucleotide
atttccacatcagaatcttc

SEQ ID NO: 845 - DNA, 20 bp, Artificial sequence
  Synthetic oligonucleotide
catttccacatcagaatctt

SEQ ID NO: 846 - DNA, 20 bp, Artificial sequence
  Synthetic oligonucleotide
ccatttccacatcagaatct

SEQ ID NO: 847 - DNA, 20 bp, Artificial sequence
  Synthetic oligonucleotide
accatttccacatcagaatc

SEQ ID NO: 848 - DNA, 20 bp, Artificial sequence
  Synthetic oligonucleotide
caccatttccacatcagaat

SEQ ID NO: 849 - DNA, 20 bp, Artificial sequence
  Synthetic oligonucleotide
ccaccatttccacatcagaa

SEQ ID NO: 850 - DNA, 20 bp, Artificial sequence
  Synthetic oligonucleotide
tccaccatttccacatcaga

SEQ ID NO: 851 - DNA, 20 bp, Artificial sequence
  Synthetic oligonucleotide
ttccaccatttccacatcag

SEQ ID NO: 852 - DNA, 20 bp, Artificial sequence
  Synthetic oligonucleotide
cttccaccatttccacatca

SEQ ID NO: 853 - DNA, 20 bp, Artificial sequence
  Synthetic oligonucleotide
tcttccaccatttccacatc

SEQ ID NO: 854 - DNA, 20 bp, Artificial sequence
  Synthetic oligonucleotide
atcttccaccatttccacat

SEQ ID NO: 855 - DNA, 20 bp, Artificial sequence
  Synthetic oligonucleotide
catcttccaccatttccaca

SEQ ID NO: 856 - DNA, 20 bp, Artificial sequence
  Synthetic oligonucleotide
tcatcttccaccatttccac

SEQ ID NO: 857 - DNA, 20 bp, Artificial sequence
  Synthetic oligonucleotide
atcatcttccaccatttcca

SEQ ID NO: 858 - DNA, 20 bp, Artificial sequence
  Synthetic oligonucleotide
aatcatcttccaccatttcc

SEQ ID NO: 859 - DNA, 20 bp, Artificial sequence
  Synthetic oligonucleotide
gaatcatcttccaccatttc

SEQ ID NO: 860 - DNA, 20 bp, Artificial sequence
  Synthetic oligonucleotide
cctttcgggaatcatcttcc

SEQ ID NO: 861 - DNA, 20 bp, Artificial sequence
  Synthetic oligonucleotide
tgcagtcatttcctttcggg

SEQ ID NO: 862 - DNA, 20 bp, Artificial sequence
  Synthetic oligonucleotide
ctgcagtcatttcctttcgg

SEQ ID NO: 863 - DNA, 20 bp, Artificial sequence
  Synthetic oligonucleotide
gctgcagtcatttcctttcg

SEQ ID NO: 864 - DNA, 20 bp, Artificial sequence
  Synthetic oligonucleotide
agctgcagtcatttcctttc

SEQ ID NO: 865 - DNA, 20 bp, Artificial sequence
  Synthetic oligonucleotide
aagctgcagtcatttccttt

SEQ ID NO: 866 - DNA, 20 bp, Artificial sequence
  Synthetic oligonucleotide
caagctgcagtcatttcctt

SEQ ID NO: 867 - DNA, 20 bp, Artificial sequence
  Synthetic oligonucleotide
acaagctgcagtcatttcct

SEQ ID NO: 868 - DNA, 20 bp, Artificial sequence
  Synthetic oligonucleotide
tacaagctgcagtcatttcc

SEQ ID NO: 869 - DNA, 20 bp, Artificial sequence
  Synthetic oligonucleotide
gtacaagctgcagtcatttc

SEQ ID NO: 870 - DNA, 20 bp, Artificial sequence
  Synthetic oligonucleotide
ggtacaagctgcagtcattt

SEQ ID NO: 871 - DNA, 20 bp, Artificial sequence
  Synthetic oligonucleotide
gggtacaagctgcagtcatt

SEQ ID NO: 872 - DNA, 20 bp, Artificial sequence
  Synthetic oligonucleotide
gttaatgatccttctccggg

SEQ ID NO: 873 - DNA, 20 bp, Artificial sequence
  Synthetic oligonucleotide
ggttaatgatccttctccgg

SEQ ID NO: 874 - DNA, 20 bp, Artificial sequence
  Synthetic oligonucleotide
aggttaatgatccttctccg

SEQ ID NO: 875 - DNA, 20 bp, Artificial sequence
  Synthetic oligonucleotide
gaggttaatgatccttctcc

SEQ ID NO: 876 - DNA, 20 bp, Artificial sequence
  Synthetic oligonucleotide
tgaggttaatgatccttctc

SEQ ID NO: 877 - DNA, 20 bp, Artificial sequence
  Synthetic oligonucleotide
gtgaggttaatgatccttct

SEQ ID NO: 878 - DNA, 20 bp, Artificial sequence
  Synthetic oligonucleotide
agtgaggttaatgatccttc

SEQ ID NO: 879 - DNA, 20 bp, Artificial sequence
  Synthetic oligonucleotide
tagtgaggttaatgatcctt

SEQ ID NO: 880 - DNA, 20 bp, Artificial sequence
  Synthetic oligonucleotide
ctagtgaggttaatgatcct

SEQ ID NO: 881 - DNA, 20 bp, Artificial sequence
  Synthetic oligonucleotide
actagtgaggttaatgatcc

SEQ ID NO: 882 - DNA, 20 bp, Artificial sequence
  Synthetic oligonucleotide
cactagtgaggttaatgatc

SEQ ID NO: 883 - DNA, 20 bp, Artificial sequence
  Synthetic oligonucleotide
ggagactcaaaacactagtg

SEQ ID NO: 884 - DNA, 20 bp, Artificial sequence
  Synthetic oligonucleotide
tggagactcaaaacactagt

SEQ ID NO: 885 - DNA, 20 bp, Artificial sequence
  Synthetic oligonucleotide
ctggagactcaaaacactag

SEQ ID NO: 886 - DNA, 20 bp, Artificial sequence
  Synthetic oligonucleotide
cctggagactcaaaacacta

SEQ ID NO: 887 - DNA, 20 bp, Artificial sequence
  Synthetic oligonucleotide
tcctggagactcaaaacact

SEQ ID NO: 888 - DNA, 20 bp, Artificial sequence
  Synthetic oligonucleotide
ttcctggagactcaaaacac

SEQ ID NO: 889 - DNA, 20 bp, Artificial sequence
  Synthetic oligonucleotide
cttcctggagactcaaaaca

SEQ ID NO: 890 - DNA, 20 bp, Artificial sequence
  Synthetic oligonucleotide
tcttcctggagactcaaaac

SEQ ID NO: 891 - DNA, 20 bp, Artificial sequence
  Synthetic oligonucleotide
ttcttcctggagactcaaaa

SEQ ID NO: 892 - DNA, 20 bp, Artificial sequence
  Synthetic oligonucleotide
tttcttcctggagactcaaa

SEQ ID NO: 893 - DNA, 20 bp, Artificial sequence
  Synthetic oligonucleotide
atttcttcctggagactcaa

SEQ ID NO: 894 - DNA, 20 bp, Artificial sequence
  Synthetic oligonucleotide
aatttcttcctggagactca

SEQ ID NO: 895 - DNA, 20 bp, Artificial sequence
  Synthetic oligonucleotide
taatttcttcctggagactc

SEQ ID NO: 896 - DNA, 20 bp, Artificial sequence
  Synthetic oligonucleotide
ttaatttcttcctggagact

SEQ ID NO: 897 - DNA, 20 bp, Artificial sequence
  Synthetic oligonucleotide
attaatttcttcctggagac

SEQ ID NO: 898 - DNA, 20 bp, Artificial sequence
  Synthetic oligonucleotide
cattaatttcttcctggaga

SEQ ID NO: 899 - DNA, 20 bp, Artificial sequence
  Synthetic oligonucleotide
tcattaatttcttcctggag

SEQ ID NO: 900 - DNA, 20 bp, Artificial sequence
  Synthetic oligonucleotide
ctcattaatttcttcctgga

SEQ ID NO: 901 - DNA, 20 bp, Artificial sequence
  Synthetic oligonucleotide
gctcattaatttcttcctgg

SEQ ID NO: 902 - DNA, 20 bp, Artificial sequence
  Synthetic oligonucleotide
tgctcattaatttcttcctg

SEQ ID NO: 903 - DNA, 20 bp, Artificial sequence
  Synthetic oligonucleotide
ctgctcattaatttcttcct

SEQ ID NO: 904 - DNA, 20 bp, Artificial sequence
  Synthetic oligonucleotide
cctgctcattaatttcttcc

SEQ ID NO: 905 - DNA, 20 bp, Artificial sequence
  Synthetic oligonucleotide
ccctgctcattaatttcttc

SEQ ID NO: 906 - DNA, 20 bp, Artificial sequence
  Synthetic oligonucleotide
tccctgctcattaatttctt

SEQ ID NO: 907 - DNA, 20 bp, Artificial sequence
  Synthetic oligonucleotide
gtccctgctcattaatttct

SEQ ID NO: 908 - DNA, 20 bp, Artificial sequence
  Synthetic oligonucleotide
tgtccctgctcattaatttc

SEQ ID NO: 909 - DNA, 20 bp, Artificial sequence
  Synthetic oligonucleotide
atgtccctgctcattaattt

SEQ ID NO: 910 - DNA, 20 bp, Artificial sequence
  Synthetic oligonucleotide
catgtccctgctcattaatt

SEQ ID NO: 911 - DNA, 20 bp, Artificial sequence
  Synthetic oligonucleotide
tcatgtccctgctcattaat

SEQ ID NO: 912 - DNA, 20 bp, Artificial sequence
  Synthetic oligonucleotide
ctcatgtccctgctcattaa

SEQ ID NO: 913 - DNA, 20 bp, Artificial sequence
  Synthetic oligonucleotide
cctcatgtccctgctcatta

SEQ ID NO: 914 - DNA, 20 bp, Artificial sequence
  Synthetic oligonucleotide
acctcatgtccctgctcatt

SEQ ID NO: 915 - DNA, 20 bp, Artificial sequence
  Synthetic oligonucleotide
aacctcatgtccctgctcat

SEQ ID NO: 916 - DNA, 20 bp, Artificial sequence
  Synthetic oligonucleotide
gaacctcatgtccctgctca

SEQ ID NO: 917 - DNA, 20 bp, Artificial sequence
  Synthetic oligonucleotide
agaacctcatgtccctgctc

SEQ ID NO: 918 - DNA, 20 bp, Artificial sequence
  Synthetic oligonucleotide
gagaacctcatgtccctgct

SEQ ID NO: 919 - DNA, 20 bp, Artificial sequence
  Synthetic oligonucleotide
tctcccggagaacctcatgt

SEQ ID NO: 920 - DNA, 20 bp, Artificial sequence
  Synthetic oligonucleotide
ttatgcaacatctcccggag

SEQ ID NO: 921 - DNA, 20 bp, Artificial sequence
  Synthetic oligonucleotide
gttatgcaacatctcccgga

SEQ ID NO: 922 - DNA, 20 bp, Artificial sequence
  Synthetic oligonucleotide
ggttatgcaacatctcccgg

SEQ ID NO: 923 - DNA, 20 bp, Artificial sequence
  Synthetic oligonucleotide
tggttatgcaacatctcccg

SEQ ID NO: 924 - DNA, 20 bp, Artificial sequence
  Synthetic oligonucleotide
gtggttatgcaacatctccc

SEQ ID NO: 925 - DNA, 20 bp, Artificial sequence
  Synthetic oligonucleotide
agtggttatgcaacatctcc

SEQ ID NO: 926 - DNA, 20 bp, Artificial sequence
  Synthetic oligonucleotide
gagtggttatgcaacatctc

SEQ ID NO: 927 - DNA, 20 bp, Artificial sequence
  Synthetic oligonucleotide
ggagtggttatgcaacatct

SEQ ID NO: 928 - DNA, 20 bp, Artificial sequence
  Synthetic oligonucleotide
aggagtggttatgcaacatc

SEQ ID NO: 929 - DNA, 20 bp, Artificial sequence
  Synthetic oligonucleotide
aaggagtggttatgcaacat

SEQ ID NO: 930 - DNA, 20 bp, Artificial sequence
  Synthetic oligonucleotide
gaaggagtggttatgcaaca

SEQ ID NO: 931 - DNA, 20 bp, Artificial sequence
  Synthetic oligonucleotide
cgaaggagtggttatgcaac

SEQ ID NO: 932 - DNA, 20 bp, Artificial sequence
  Synthetic oligonucleotide
acgaaggagtggttatgcaa

SEQ ID NO: 933 - DNA, 20 bp, Artificial sequence
  Synthetic oligonucleotide
gattcacacagcccacgaag

SEQ ID NO: 934 - DNA, 20 bp, Artificial sequence
  Synthetic oligonucleotide
ggattcacacagcccacgaa

SEQ ID NO: 935 - DNA, 20 bp, Artificial sequence
  Synthetic oligonucleotide
aggattcacacagcccacga

SEQ ID NO: 936 - DNA, 20 bp, Artificial sequence
  Synthetic oligonucleotide
tgaggattcacacagcccac

SEQ ID NO: 937 - DNA, 20 bp, Artificial sequence
  Synthetic oligonucleotide
ctgaggattcacacagccca

SEQ ID NO: 938 - DNA, 20 bp, Artificial sequence
  Synthetic oligonucleotide
actgaggattcacacagccc

SEQ ID NO: 939 - DNA, 20 bp, Artificial sequence
  Synthetic oligonucleotide
cactgaggattcacacagcc

SEQ ID NO: 940 - DNA, 20 bp, Artificial sequence
  Synthetic oligonucleotide
ggtttgatgctgtgccaagg

SEQ ID NO: 941 - DNA, 20 bp, Artificial sequence
  Synthetic oligonucleotide
tggtttgatgctgtgccaag

SEQ ID NO: 942 - DNA, 20 bp, Artificial sequence
  Synthetic oligonucleotide
ttggtttgatgctgtgccaa

SEQ ID NO: 943 - DNA, 20 bp, Artificial sequence
  Synthetic oligonucleotide
cttggtttgatgctgtgcca

SEQ ID NO: 944 - DNA, 20 bp, Artificial sequence
  Synthetic oligonucleotide
acttggtttgatgctgtgcc

SEQ ID NO: 945 - DNA, 20 bp, Artificial sequence
  Synthetic oligonucleotide
aacttggtttgatgctgtgc

SEQ ID NO: 946 - DNA, 20 bp, Artificial sequence
  Synthetic oligonucleotide
taacttggtttgatgctgtg

SEQ ID NO: 947 - DNA, 20 bp, Artificial sequence
  Synthetic oligonucleotide
ataacttggtttgatgctgt

SEQ ID NO: 948 - DNA, 20 bp, Artificial sequence
  Synthetic oligonucleotide
tataacttggtttgatgctg

SEQ ID NO: 949 - DNA, 20 bp, Artificial sequence
  Synthetic oligonucleotide
gtataacttggtttgatgct

SEQ ID NO: 950 - DNA, 20 bp, Artificial sequence
  Synthetic oligonucleotide
ggtataacttggtttgatgc

SEQ ID NO: 951 - DNA, 20 bp, Artificial sequence
  Synthetic oligonucleotide
aggtataacttggtttgatg

SEQ ID NO: 952 - DNA, 20 bp, Artificial sequence
  Synthetic oligonucleotide
aaggtataacttggtttgat

SEQ ID NO: 953 - DNA, 20 bp, Artificial sequence
  Synthetic oligonucleotide
gaaggtataacttggtttga

SEQ ID NO: 954 - DNA, 20 bp, Artificial sequence
  Synthetic oligonucleotide
agaaggtataacttggtttg

SEQ ID NO: 955 - DNA, 20 bp, Artificial sequence
  Synthetic oligonucleotide
gagaaggtataacttggttt

SEQ ID NO: 956 - DNA, 20 bp, Artificial sequence
  Synthetic oligonucleotide
tgagaaggtataacttggtt

SEQ ID NO: 957 - DNA, 20 bp, Artificial sequence
  Synthetic oligonucleotide
ttgagaaggtataacttggt

SEQ ID NO: 958 - DNA, 20 bp, Artificial sequence
  Synthetic oligonucleotide
gttgagaaggtataacttgg

SEQ ID NO: 959 - DNA, 20 bp, Artificial sequence
  Synthetic oligonucleotide
tgttgagaaggtataacttg

SEQ ID NO: 960 - DNA, 20 bp, Artificial sequence
  Synthetic oligonucleotide
gtgttgagaaggtataactt

SEQ ID NO: 961 - DNA, 20 bp, Artificial sequence
  Synthetic oligonucleotide
ggtgttgagaaggtataact

SEQ ID NO: 962 - DNA, 20 bp, Artificial sequence
  Synthetic oligonucleotide
tggtgttgagaaggtataac

SEQ ID NO: 963 - DNA, 20 bp, Artificial sequence
  Synthetic oligonucleotide
gtggtgttgagaaggtataa

SEQ ID NO: 964 - DNA, 20 bp, Artificial sequence
  Synthetic oligonucleotide
ggtggtgttgagaaggtata

SEQ ID NO: 965 - DNA, 20 bp, Artificial sequence
  Synthetic oligonucleotide
tggtggtgttgagaaggtat

SEQ ID NO: 966 - DNA, 20 bp, Artificial sequence
  Synthetic oligonucleotide
ttggtggtgttgagaaggta

SEQ ID NO: 967 - DNA, 20 bp, Artificial sequence
  Synthetic oligonucleotide
cttggtggtgttgagaaggt

SEQ ID NO: 968 - DNA, 20 bp, Artificial sequence
  Synthetic oligonucleotide
gcttggtggtgttgagaagg

SEQ ID NO: 969 - DNA, 20 bp, Artificial sequence
  Synthetic oligonucleotide
agcttggtggtgttgagaag

SEQ ID NO: 970 - DNA, 20 bp, Artificial sequence
  Synthetic oligonucleotide
aagcttggtggtgttgagaa

SEQ ID NO: 971 - DNA, 20 bp, Artificial sequence
  Synthetic oligonucleotide
taagcttggtggtgttgaga

SEQ ID NO: 972 - DNA, 20 bp, Artificial sequence
  Synthetic oligonucleotide
ctaagcttggtggtgttgag

SEQ ID NO: 973 - DNA, 20 bp, Artificial sequence
  Synthetic oligonucleotide
actaagcttggtggtgttga

SEQ ID NO: 974 - DNA, 20 bp, Artificial sequence
  Synthetic oligonucleotide
cactaagcttggtggtgttg

SEQ ID NO: 975 - DNA, 20 bp, Artificial sequence
  Synthetic oligonucleotide
agttcttcactaagcttggt

SEQ ID NO: 976 - DNA, 20 bp, Artificial sequence
  Synthetic oligonucleotide
cagttcttcactaagcttgg

SEQ ID NO: 977 - DNA, 20 bp, Artificial sequence
  Synthetic oligonucleotide
acagttcttcactaagcttg

SEQ ID NO: 978 - DNA, 20 bp, Artificial sequence
  Synthetic oligonucleotide
aacagttcttcactaagctt

SEQ ID NO: 979 - DNA, 20 bp, Artificial sequence
  Synthetic oligonucleotide
gaacagttcttcactaagct

SEQ ID NO: 980 - DNA, 20 bp, Artificial sequence
  Synthetic oligonucleotide
agaacagttcttcactaagc

SEQ ID NO: 981 - DNA, 20 bp, Artificial sequence
  Synthetic oligonucleotide
aatgagtatctggtagaaca

SEQ ID NO: 982 - DNA, 20 bp, Artificial sequence
  Synthetic oligonucleotide
aaatgagtatctggtagaac

SEQ ID NO: 983 - DNA, 20 bp, Artificial sequence
  Synthetic oligonucleotide
taaatgagtatctggtagaa

SEQ ID NO: 984 - DNA, 20 bp, Artificial sequence
  Synthetic oligonucleotide
ataaatgagtatctggtaga

SEQ ID NO: 985 - DNA, 20 bp, Artificial sequence
  Synthetic oligonucleotide
cataaatgagtatctggtag

SEQ ID NO: 986 - DNA, 20 bp, Artificial sequence
  Synthetic oligonucleotide
tcataaatgagtatctggta

SEQ ID NO: 987 - DNA, 20 bp, Artificial sequence
  Synthetic oligonucleotide
aattggcaaaatcataaatg

SEQ ID NO: 988 - DNA, 20 bp, Artificial sequence
  Synthetic oligonucleotide
caaaattggcaaaatcataa

SEQ ID NO: 989 - DNA, 20 bp, Artificial sequence
  Synthetic oligonucleotide
acctgagaacaccaaaattg

SEQ ID NO: 990 - DNA, 20 bp, Artificial sequence
  Synthetic oligonucleotide
aacctgagaacaccaaaatt

SEQ ID NO: 991 - DNA, 20 bp, Artificial sequence
  Synthetic oligonucleotide
taacctgagaacaccaaaat

SEQ ID NO: 992 - DNA, 20 bp, Artificial sequence
  Synthetic oligonucleotide
ataacctgagaacaccaaaa

SEQ ID NO: 993 - DNA, 20 bp, Artificial sequence
  Synthetic oligonucleotide
gataacctgagaacaccaaa

SEQ ID NO: 994 - DNA, 20 bp, Artificial sequence
  Synthetic oligonucleotide
cgataacctgagaacaccaa

SEQ ID NO: 995 - DNA, 20 bp, Artificial sequence
  Synthetic oligonucleotide
ccgataacctgagaacacca

SEQ ID NO: 996 - DNA, 20 bp, Artificial sequence
  Synthetic oligonucleotide
tccgataacctgagaacacc

SEQ ID NO: 997 - DNA, 20 bp, Artificial sequence
  Synthetic oligonucleotide
ctccgataacctgagaacac

SEQ ID NO: 998 - DNA, 20 bp, Artificial sequence
  Synthetic oligonucleotide
gctccgataacctgagaaca

SEQ ID NO: 999 - DNA, 20 bp, Artificial sequence
  Synthetic oligonucleotide
ggctccgataacctgagaac

SEQ ID NO: 1000 - DNA, 20 bp, Artificial sequence
  Synthetic oligonucleotide
tggctccgataacctgagaa

SEQ ID NO: 1001 - DNA, 20 bp, Artificial sequence
  Synthetic oligonucleotide
ctggctccgataacctgaga

SEQ ID NO: 1002 - DNA, 20 bp, Artificial sequence
  Synthetic oligonucleotide
tgctggctccgataacctga

SEQ ID NO: 1003 - DNA, 20 bp, Artificial sequence
  Synthetic oligonucleotide
aaggtcaaagagcggtgctg

SEQ ID NO: 1004 - DNA, 20 bp, Artificial sequence
  Synthetic oligonucleotide
tggcaaggtcaaagagcggt

SEQ ID NO: 1005 - DNA, 20 bp, Artificial sequence
  Synthetic oligonucleotide
atggcaaggtcaaagagcgg

SEQ ID NO: 1006 - DNA, 20 bp, Artificial sequence
  Synthetic oligonucleotide
catggcaaggtcaaagagcg

SEQ ID NO: 1007 - DNA, 20 bp, Artificial sequence
  Synthetic oligonucleotide
gcatggcaaggtcaaagagc

SEQ ID NO: 1008 - DNA, 20 bp, Artificial sequence
  Synthetic oligonucleotide
agcatggcaaggtcaaagag

SEQ ID NO: 1009 - DNA, 20 bp, Artificial sequence
  Synthetic oligonucleotide
aagcatggcaaggtcaaaga

SEQ ID NO: 1010 - DNA, 20 bp, Artificial sequence
  Synthetic oligonucleotide
caagcatggcaaggtcaaag

SEQ ID NO: 1011 - DNA, 20 bp, Artificial sequence
  Synthetic oligonucleotide
gcaagcatggcaaggtcaaa

SEQ ID NO: 1012 - DNA, 20 bp, Artificial sequence
  Synthetic oligonucleotide
actatctaaggcaagcatgg

SEQ ID NO: 1013 - DNA, 20 bp, Artificial sequence
  Synthetic oligonucleotide
gactatctaaggcaagcatg

SEQ ID NO: 1014 - DNA, 20 bp, Artificial sequence
  Synthetic oligonucleotide
ggactatctaaggcaagcat

SEQ ID NO: 1015 - DNA, 20 bp, Artificial sequence
  Synthetic oligonucleotide
tggactatctaaggcaagca

SEQ ID NO: 1016 - DNA, 20 bp, Artificial sequence
  Synthetic oligonucleotide
ctggactatctaaggcaagc

SEQ ID NO: 1017 - DNA, 20 bp, Artificial sequence
  Synthetic oligonucleotide
tctggactatctaaggcaag

SEQ ID NO: 1018 - DNA, 20 bp, Artificial sequence
  Synthetic oligonucleotide
ctctggactatctaaggcaa

SEQ ID NO: 1019 - DNA, 20 bp, Artificial sequence
  Synthetic oligonucleotide
tctctggactatctaaggca

SEQ ID NO: 1020 - DNA, 20 bp, Artificial sequence
  Synthetic oligonucleotide
ctctctggactatctaaggc

SEQ ID NO: 1021 - DNA, 20 bp, Artificial sequence
  Synthetic oligonucleotide
actctctggactatctaagg

SEQ ID NO: 1022 - DNA, 20 bp, Artificial sequence
  Synthetic oligonucleotide
cactctctggactatctaag

SEQ ID NO: 1023 - DNA, 20 bp, Artificial sequence
  Synthetic oligonucleotide
ttcctctgtccagccactct

SEQ ID NO: 1024 - DNA, 20 bp, Artificial sequence
  Synthetic oligonucleotide
tcttcctctgtccagccact

SEQ ID NO: 1025 - DNA, 20 bp, Artificial sequence
  Synthetic oligonucleotide
atcttcctctgtccagccac

SEQ ID NO: 1026 - DNA, 20 bp, Artificial sequence
  Synthetic oligonucleotide
catcttcctctgtccagcca

SEQ ID NO: 1027 - DNA, 20 bp, Artificial sequence
  Synthetic oligonucleotide
accatcttcctctgtccagc

SEQ ID NO: 1028 - DNA, 20 bp, Artificial sequence
  Synthetic oligonucleotide
gaccatcttcctctgtccag

SEQ ID NO: 1029 - DNA, 20 bp, Artificial sequence
  Synthetic oligonucleotide
tgggaccatcttcctctgtc

SEQ ID NO: 1030 - DNA, 20 bp, Artificial sequence
  Synthetic oligonucleotide
ttgggaccatcttcctctgt

SEQ ID NO: 1031 - DNA, 20 bp, Artificial sequence
  Synthetic oligonucleotide
tttgggaccatcttcctctg

SEQ ID NO: 1032 - DNA, 20 bp, Artificial sequence
  Synthetic oligonucleotide
ctttgggaccatcttcctct

SEQ ID NO: 1033 - DNA, 20 bp, Artificial sequence
  Synthetic oligonucleotide
tctttgggaccatcttcctc

SEQ ID NO: 1034 - DNA, 20 bp, Artificial sequence
  Synthetic oligonucleotide
ttctttgggaccatcttcct

SEQ ID NO: 1035 - DNA, 20 bp, Artificial sequence
  Synthetic oligonucleotide
cttctttgggaccatcttcc

SEQ ID NO: 1036 - DNA, 20 bp, Artificial sequence
  Synthetic oligonucleotide
ccttctttgggaccatcttc

SEQ ID NO: 1037 - DNA, 20 bp, Artificial sequence
  Synthetic oligonucleotide
tccttctttgggaccatctt

SEQ ID NO: 1038 - DNA, 20 bp, Artificial sequence
  Synthetic oligonucleotide
cagcaagtccttctttggga

SEQ ID NO: 1039 - DNA, 20 bp, Artificial sequence
  Synthetic oligonucleotide
tcagcaagtccttctttggg

SEQ ID NO: 1040 - DNA, 20 bp, Artificial sequence
  Synthetic oligonucleotide
ttcagcaagtccttctttgg

SEQ ID NO: 1041 - DNA, 20 bp, Artificial sequence
  Synthetic oligonucleotide
attcagcaagtccttctttg

SEQ ID NO: 1042 - DNA, 20 bp, Artificial sequence
  Synthetic oligonucleotide
tattcagcaagtccttcttt

SEQ ID NO: 1043 - DNA, 20 bp, Artificial sequence
  Synthetic oligonucleotide
gtattcagcaagtccttctt

SEQ ID NO: 1044 - DNA, 20 bp, Artificial sequence
  Synthetic oligonucleotide
tgtattcagcaagtccttct

SEQ ID NO: 1045 - DNA, 20 bp, Artificial sequence
  Synthetic oligonucleotide
atgtattcagcaagtccttc

SEQ ID NO: 1046 - DNA, 20 bp, Artificial sequence
  Synthetic oligonucleotide
aatgtattcagcaagtcctt

SEQ ID NO: 1047 - DNA, 20 bp, Artificial sequence
  Synthetic oligonucleotide
caatgtattcagcaagtcct

SEQ ID NO: 1048 - DNA, 20 bp, Artificial sequence
  Synthetic oligonucleotide
acaatgtattcagcaagtcc

SEQ ID NO: 1049 - DNA, 20 bp, Artificial sequence
  Synthetic oligonucleotide
aacaatgtattcagcaagtc

SEQ ID NO: 1050 - DNA, 20 bp, Artificial sequence
  Synthetic oligonucleotide
caacaatgtattcagcaagt

SEQ ID NO: 1051 - DNA, 20 bp, Artificial sequence
  Synthetic oligonucleotide
tcaacaatgtattcagcaag

SEQ ID NO: 1052 - DNA, 20 bp, Artificial sequence
  Synthetic oligonucleotide
ctcaacaatgtattcagcaa

SEQ ID NO: 1053 - DNA, 20 bp, Artificial sequence
  Synthetic oligonucleotide
actcaacaatgtattcagca

SEQ ID NO: 1054 - DNA, 20 bp, Artificial sequence
  Synthetic oligonucleotide
aactcaacaatgtattcagc

SEQ ID NO: 1055 - DNA, 20 bp, Artificial sequence
  Synthetic oligonucleotide
aaactcaacaatgtattcag

SEQ ID NO: 1056 - DNA, 20 bp, Artificial sequence
  Synthetic oligonucleotide
gaaactcaacaatgtattca

SEQ ID NO: 1057 - DNA, 20 bp, Artificial sequence
  Synthetic oligonucleotide
agaaactcaacaatgtattc

SEQ ID NO: 1058 - DNA, 20 bp, Artificial sequence
  Synthetic oligonucleotide
cagaaactcaacaatgtatt

SEQ ID NO: 1059 - DNA, 20 bp, Artificial sequence
  Synthetic oligonucleotide
tcagaaactcaacaatgtat

SEQ ID NO: 1060 - DNA, 20 bp, Artificial sequence
  Synthetic oligonucleotide
ttcagaaactcaacaatgta

SEQ ID NO: 1061 - DNA, 20 bp, Artificial sequence
  Synthetic oligonucleotide
cttcagaaactcaacaatgt

SEQ ID NO: 1062 - DNA, 20 bp, Artificial sequence
  Synthetic oligonucleotide
tcttcagaaactcaacaatg

SEQ ID NO: 1063 - DNA, 20 bp, Artificial sequence
  Synthetic oligonucleotide
ttcttcagaaactcaacaat

SEQ ID NO: 1064 - DNA, 20 bp, Artificial sequence
  Synthetic oligonucleotide
cttcttcagaaactcaacaa

SEQ ID NO: 1065 - DNA, 20 bp, Artificial sequence
  Synthetic oligonucleotide
tcttcttcagaaactcaaca

SEQ ID NO: 1066 - DNA, 20 bp, Artificial sequence
  Synthetic oligonucleotide
ttcttcttcagaaactcaac

SEQ ID NO: 1067 - DNA, 20 bp, Artificial sequence
  Synthetic oligonucleotide
tctcagccttcttcttcaga

SEQ ID NO: 1068 - DNA, 20 bp, Artificial sequence
  Synthetic oligonucleotide
atctcagccttcttcttcag

SEQ ID NO: 1069 - DNA, 20 bp, Artificial sequence
  Synthetic oligonucleotide
catctcagccttcttcttca

SEQ ID NO: 1070 - DNA, 20 bp, Artificial sequence
  Synthetic oligonucleotide
gcatctcagccttcttcttc

SEQ ID NO: 1071 - DNA, 20 bp, Artificial sequence
  Synthetic oligonucleotide
agcatctcagccttcttctt

SEQ ID NO: 1072 - DNA, 20 bp, Artificial sequence
  Synthetic oligonucleotide
aagcatctcagccttcttct

SEQ ID NO: 1073 - DNA, 20 bp, Artificial sequence
  Synthetic oligonucleotide
caagcatctcagccttcttc

SEQ ID NO: 1074 - DNA, 20 bp, Artificial sequence
  Synthetic oligonucleotide
gcaagcatctcagccttctt

SEQ ID NO: 1075 - DNA, 20 bp, Artificial sequence
  Synthetic oligonucleotide
tgcaagcatctcagccttct

SEQ ID NO: 1076 - DNA, 20 bp, Artificial sequence
  Synthetic oligonucleotide
ctgcaagcatctcagccttc

SEQ ID NO: 1077 - DNA, 20 bp, Artificial sequence
  Synthetic oligonucleotide
tctgcaagcatctcagcctt

SEQ ID NO: 1078 - DNA, 20 bp, Artificial sequence
  Synthetic oligonucleotide
gtctgcaagcatctcagcct

SEQ ID NO: 1079 - DNA, 20 bp, Artificial sequence
  Synthetic oligonucleotide
agtctgcaagcatctcagcc

SEQ ID NO: 1080 - DNA, 20 bp, Artificial sequence
  Synthetic oligonucleotide
tagtctgcaagcatctcagc

SEQ ID NO: 1081 - DNA, 20 bp, Artificial sequence
  Synthetic oligonucleotide
atagtctgcaagcatctcag

SEQ ID NO: 1082 - DNA, 20 bp, Artificial sequence
  Synthetic oligonucleotide
aatagtctgcaagcatctca

SEQ ID NO: 1083 - DNA, 20 bp, Artificial sequence
  Synthetic oligonucleotide
aaatagtctgcaagcatctc

SEQ ID NO: 1084 - DNA, 20 bp, Artificial sequence
  Synthetic oligonucleotide
gaaatagtctgcaagcatct

SEQ ID NO: 1085 - DNA, 20 bp, Artificial sequence
  Synthetic oligonucleotide
agaaatagtctgcaagcatc

SEQ ID NO: 1086 - DNA, 20 bp, Artificial sequence
  Synthetic oligonucleotide
gagaaatagtctgcaagcat

SEQ ID NO: 1087 - DNA, 20 bp, Artificial sequence
  Synthetic oligonucleotide
agagaaatagtctgcaagca

SEQ ID NO: 1088 - DNA, 20 bp, Artificial sequence
  Synthetic oligonucleotide
aagagaaatagtctgcaagc

SEQ ID NO: 1089 - DNA, 20 bp, Artificial sequence
  Synthetic oligonucleotide
aaagagaaatagtctgcaag

SEQ ID NO: 1090 - DNA, 20 bp, Artificial sequence
  Synthetic oligonucleotide
caaagagaaatagtctgcaa

SEQ ID NO: 1091 - DNA, 20 bp, Artificial sequence
  Synthetic oligonucleotide
ccaaagagaaatagtctgca

SEQ ID NO: 1092 - DNA, 20 bp, Artificial sequence
  Synthetic oligonucleotide
tccaaagagaaatagtctgc

SEQ ID NO: 1093 - DNA, 20 bp, Artificial sequence
  Synthetic oligonucleotide
ttccaaagagaaatagtctg

SEQ ID NO: 1094 - DNA, 20 bp, Artificial sequence
  Synthetic oligonucleotide
tcatcaatttccaaagagaa

SEQ ID NO: 1095 - DNA, 20 bp, Artificial sequence
  Synthetic oligonucleotide
ctcatcaatttccaaagaga

SEQ ID NO: 1096 - DNA, 20 bp, Artificial sequence
  Synthetic oligonucleotide
cctcatcaatttccaaagag

SEQ ID NO: 1097 - DNA, 20 bp, Artificial sequence
  Synthetic oligonucleotide
tcctcatcaatttccaaaga

SEQ ID NO: 1098 - DNA, 20 bp, Artificial sequence
  Synthetic oligonucleotide
ttcctcatcaatttccaaag

SEQ ID NO: 1099 - DNA, 20 bp, Artificial sequence
  Synthetic oligonucleotide
cttcctcatcaatttccaaa

SEQ ID NO: 1100 - DNA, 20 bp, Artificial sequence
  Synthetic oligonucleotide
ccttcctcatcaatttccaa

SEQ ID NO: 1101 - DNA, 20 bp, Artificial sequence
  Synthetic oligonucleotide
cccttcctcatcaatttcca

SEQ ID NO: 1102 - DNA, 20 bp, Artificial sequence
  Synthetic oligonucleotide
tcccttcctcatcaatttcc

SEQ ID NO: 1103 - DNA, 20 bp, Artificial sequence
  Synthetic oligonucleotide
ttcccttcctcatcaatttc

SEQ ID NO: 1104 - DNA, 20 bp, Artificial sequence
  Synthetic oligonucleotide
gttcccttcctcatcaattt

SEQ ID NO: 1105 - DNA, 20 bp, Artificial sequence
  Synthetic oligonucleotide
ggttcccttcctcatcaatt

SEQ ID NO: 1106 - DNA, 20 bp, Artificial sequence
  Synthetic oligonucleotide
aggttcccttcctcatcaat

SEQ ID NO: 1107 - DNA, 20 bp, Artificial sequence
  Synthetic oligonucleotide
caggttcccttcctcatcaa

SEQ ID NO: 1108 - DNA, 20 bp, Artificial sequence
  Synthetic oligonucleotide
tcaggttcccttcctcatca

SEQ ID NO: 1109 - DNA, 20 bp, Artificial sequence
  Synthetic oligonucleotide
atcaggttcccttcctcatc

SEQ ID NO: 1110 - DNA, 20 bp, Artificial sequence
  Synthetic oligonucleotide
aatcaggttcccttcctcat

SEQ ID NO: 1111 - DNA, 20 bp, Artificial sequence
  Synthetic oligonucleotide
caatcaggttcccttcctca

SEQ ID NO: 1112 - DNA, 20 bp, Artificial sequence
  Synthetic oligonucleotide
ccaatcaggttcccttcctc

SEQ ID NO: 1113 - DNA, 20 bp, Artificial sequence
  Synthetic oligonucleotide
atagttgtcaatcagaaggg

SEQ ID NO: 1114 - DNA, 20 bp, Artificial sequence
  Synthetic oligonucleotide
catagttgtcaatcagaagg

SEQ ID NO: 1115 - DNA, 20 bp, Artificial sequence
  Synthetic oligonucleotide
acatagttgtcaatcagaag

SEQ ID NO: 1116 - DNA, 20 bp, Artificial sequence
  Synthetic oligonucleotide
cacatagttgtcaatcagaa

SEQ ID NO: 1117 - DNA, 20 bp, Artificial sequence
  Synthetic oligonucleotide
gcacatagttgtcaatcaga

SEQ ID NO: 1118 - DNA, 20 bp, Artificial sequence
  Synthetic oligonucleotide
ggcacatagttgtcaatcag

SEQ ID NO: 1119 - DNA, 20 bp, Artificial sequence
  Synthetic oligonucleotide
gggcacatagttgtcaatca

SEQ ID NO: 1120 - DNA, 20 bp, Artificial sequence
  Synthetic oligonucleotide
gaatgaagataggcagtccc

SEQ ID NO: 1121 - DNA, 20 bp, Artificial sequence
  Synthetic oligonucleotide
agaatgaagataggcagtcc

SEQ ID NO: 1122 - DNA, 20 bp, Artificial sequence
  Synthetic oligonucleotide
aagaatgaagataggcagtc

SEQ ID NO: 1123 - DNA, 20 bp, Artificial sequence
  Synthetic oligonucleotide
gaagaatgaagataggcagt

SEQ ID NO: 1124 - DNA, 20 bp, Artificial sequence
  Synthetic oligonucleotide
cgaagaatgaagataggcag

SEQ ID NO: 1125 - DNA, 20 bp, Artificial sequence
  Synthetic oligonucleotide
tcgaagaatgaagataggca

SEQ ID NO: 1126 - DNA, 20 bp, Artificial sequence
  Synthetic oligonucleotide
cctcagtggctagtcgaaga

SEQ ID NO: 1127 - DNA, 20 bp, Artificial sequence
  Synthetic oligonucleotide
tcgtcccaattcacctcagt

SEQ ID NO: 1128 - DNA, 20 bp, Artificial sequence
  Synthetic oligonucleotide
ttcgtcccaattcacctcag

SEQ ID NO: 1129 - DNA, 20 bp, Artificial sequence
  Synthetic oligonucleotide
cttcgtcccaattcacctca

SEQ ID NO: 1130 - DNA, 20 bp, Artificial sequence
  Synthetic oligonucleotide
tcttcgtcccaattcacctc

SEQ ID NO: 1131 - DNA, 20 bp, Artificial sequence
  Synthetic oligonucleotide
ttcttcgtcccaattcacct

SEQ ID NO: 1132 - DNA, 20 bp, Artificial sequence
  Synthetic oligonucleotide
tttcttcgtcccaattcacc

SEQ ID NO: 1133 - DNA, 20 bp, Artificial sequence
  Synthetic oligonucleotide
ttttcttcgtcccaattcac

SEQ ID NO: 1134 - DNA, 20 bp, Artificial sequence
  Synthetic oligonucleotide
cttttcttcgtcccaattca

SEQ ID NO: 1135 - DNA, 20 bp, Artificial sequence
  Synthetic oligonucleotide
ccttttcttcgtcccaattc

SEQ ID NO: 1136 - DNA, 20 bp, Artificial sequence
  Synthetic oligonucleotide
tccttttcttcgtcccaatt

SEQ ID NO: 1137 - DNA, 20 bp, Artificial sequence
  Synthetic oligonucleotide
ttccttttcttcgtcccaat

SEQ ID NO: 1138 - DNA, 20 bp, Artificial sequence
  Synthetic oligonucleotide
attccttttcttcgtcccaa

SEQ ID NO: 1139 - DNA, 20 bp, Artificial sequence
  Synthetic oligonucleotide
cattccttttcttcgtccca

SEQ ID NO: 1140 - DNA, 20 bp, Artificial sequence
  Synthetic oligonucleotide
acattccttttcttcgtccc

SEQ ID NO: 1141 - DNA, 20 bp, Artificial sequence
  Synthetic oligonucleotide
aacattccttttcttcgtcc

SEQ ID NO: 1142 - DNA, 20 bp, Artificial sequence
  Synthetic oligonucleotide
aaacattccttttcttcgtc

SEQ ID NO: 1143 - DNA, 20 bp, Artificial sequence
  Synthetic oligonucleotide
aaaacattccttttcttcgt

SEQ ID NO: 1144 - DNA, 20 bp, Artificial sequence
  Synthetic oligonucleotide
caaaacattccttttcttcg

SEQ ID NO: 1145 - DNA, 20 bp, Artificial sequence
  Synthetic oligonucleotide
tcaaaacattccttttcttc

SEQ ID NO: 1146 - DNA, 20 bp, Artificial sequence
  Synthetic oligonucleotide
ttcaaaacattccttttctt

SEQ ID NO: 1147 - DNA, 20 bp, Artificial sequence
  Synthetic oligonucleotide
tttcaaaacattccttttct

SEQ ID NO: 1148 - DNA, 20 bp, Artificial sequence
  Synthetic oligonucleotide
ctttcaaaacattccttttc

SEQ ID NO: 1149 - DNA, 20 bp, Artificial sequence
  Synthetic oligonucleotide
gctttcaaaacattcctttt

SEQ ID NO: 1150 - DNA, 20 bp, Artificial sequence
  Synthetic oligonucleotide
ggctttcaaaacattccttt

SEQ ID NO: 1151 - DNA, 20 bp, Artificial sequence
  Synthetic oligonucleotide
aggctttcaaaacattcctt

SEQ ID NO: 1152 - DNA, 20 bp, Artificial sequence
  Synthetic oligonucleotide
gaggctttcaaaacattcct

SEQ ID NO: 1153 - DNA, 20 bp, Artificial sequence
  Synthetic oligonucleotide
tgaggctttcaaaacattcc

SEQ ID NO: 1154 - DNA, 20 bp, Artificial sequence
  Synthetic oligonucleotide
ctgaggctttcaaaacattc

SEQ ID NO: 1155 - DNA, 20 bp, Artificial sequence
  Synthetic oligonucleotide
actgaggctttcaaaacatt

SEQ ID NO: 1156 - DNA, 20 bp, Artificial sequence
  Synthetic oligonucleotide
tactgaggctttcaaaacat

SEQ ID NO: 1157 - DNA, 20 bp, Artificial sequence
  Synthetic oligonucleotide
ttactgaggctttcaaaaca

SEQ ID NO: 1158 - DNA, 20 bp, Artificial sequence
  Synthetic oligonucleotide
tttactgaggctttcaaaac

SEQ ID NO: 1159 - DNA, 20 bp, Artificial sequence
  Synthetic oligonucleotide
ctttactgaggctttcaaaa

SEQ ID NO: 1160 - DNA, 20 bp, Artificial sequence
  Synthetic oligonucleotide
tctttactgaggctttcaaa

SEQ ID NO: 1161 - DNA, 20 bp, Artificial sequence
  Synthetic oligonucleotide
ttctttactgaggctttcaa

SEQ ID NO: 1162 - DNA, 20 bp, Artificial sequence
  Synthetic oligonucleotide
attctttactgaggctttca

SEQ ID NO: 1163 - DNA, 20 bp, Artificial sequence
  Synthetic oligonucleotide
cattctttactgaggctttc

SEQ ID NO: 1164 - DNA, 20 bp, Artificial sequence
  Synthetic oligonucleotide
gcattctttactgaggcttt

SEQ ID NO: 1165 - DNA, 20 bp, Artificial sequence
  Synthetic oligonucleotide
cgcattctttactgaggctt

SEQ ID NO: 1166 - DNA, 20 bp, Artificial sequence
  Synthetic oligonucleotide
gcgcattctttactgaggct

SEQ ID NO: 1167 - DNA, 20 bp, Artificial sequence
  Synthetic oligonucleotide
agcgcattctttactgaggc

SEQ ID NO: 1168 - DNA, 20 bp, Artificial sequence
  Synthetic oligonucleotide
tagcgcattctttactgagg

SEQ ID NO: 1169 - DNA, 20 bp, Artificial sequence
  Synthetic oligonucleotide
atagcgcattctttactgag

SEQ ID NO: 1170 - DNA, 20 bp, Artificial sequence
  Synthetic oligonucleotide
catagcgcattctttactga

SEQ ID NO: 1171 - DNA, 20 bp, Artificial sequence
  Synthetic oligonucleotide
acatagcgcattctttactg

SEQ ID NO: 1172 - DNA, 20 bp, Artificial sequence
  Synthetic oligonucleotide
aacatagcgcattctttact

SEQ ID NO: 1173 - DNA, 20 bp, Artificial sequence
  Synthetic oligonucleotide
gaacatagcgcattctttac

SEQ ID NO: 1174 - DNA, 20 bp, Artificial sequence
  Synthetic oligonucleotide
agaacatagcgcattcttta

SEQ ID NO: 1175 - DNA, 20 bp, Artificial sequence
  Synthetic oligonucleotide
tagaacatagcgcattcttt

SEQ ID NO: 1176 - DNA, 20 bp, Artificial sequence
  Synthetic oligonucleotide
atagaacatagcgcattctt

SEQ ID NO: 1177 - DNA, 20 bp, Artificial sequence
  Synthetic oligonucleotide
aatagaacatagcgcattct

SEQ ID NO: 1178 - DNA, 20 bp, Artificial sequence
  Synthetic oligonucleotide
gaatagaacatagcgcattc

SEQ ID NO: 1179 - DNA, 20 bp, Artificial sequence
  Synthetic oligonucleotide
ggaatagaacatagcgcatt

SEQ ID NO: 1180 - DNA, 20 bp, Artificial sequence
  Synthetic oligonucleotide
tggaatagaacatagcgcat

SEQ ID NO: 1181 - DNA, 20 bp, Artificial sequence
  Synthetic oligonucleotide
atggaatagaacatagcgca

SEQ ID NO: 1182 - DNA, 20 bp, Artificial sequence
  Synthetic oligonucleotide
gatggaatagaacatagcgc

SEQ ID NO: 1183 - DNA, 20 bp, Artificial sequence
  Synthetic oligonucleotide
ggatggaatagaacatagcg

SEQ ID NO: 1184 - DNA, 20 bp, Artificial sequence
  Synthetic oligonucleotide
cggatggaatagaacatagc

SEQ ID NO: 1185 - DNA, 20 bp, Artificial sequence
  Synthetic oligonucleotide
ccggatggaatagaacatag

SEQ ID NO: 1186 - DNA, 20 bp, Artificial sequence
  Synthetic oligonucleotide
tatgtactgcttccggatgg

SEQ ID NO: 1187 - DNA, 20 bp, Artificial sequence
  Synthetic oligonucleotide
atatgtactgcttccggatg

SEQ ID NO: 1188 - DNA, 20 bp, Artificial sequence
  Synthetic oligonucleotide
gatatgtactgcttccggat

SEQ ID NO: 1189 - DNA, 20 bp, Artificial sequence
  Synthetic oligonucleotide
agatatgtactgcttccgga

SEQ ID NO: 1190 - DNA, 20 bp, Artificial sequence
  Synthetic oligonucleotide
cagatatgtactgcttccgg

SEQ ID NO: 1191 - DNA, 20 bp, Artificial sequence
  Synthetic oligonucleotide
tcagatatgtactgcttccg

SEQ ID NO: 1192 - DNA, 20 bp, Artificial sequence
  Synthetic oligonucleotide
ctcagatatgtactgcttcc

SEQ ID NO: 1193 - DNA, 20 bp, Artificial sequence
  Synthetic oligonucleotide
cctcagatatgtactgcttc

SEQ ID NO: 1194 - DNA, 20 bp, Artificial sequence
  Synthetic oligonucleotide
tcctcagatatgtactgctt

SEQ ID NO: 1195 - DNA, 20 bp, Artificial sequence
  Synthetic oligonucleotide
ctcctcagatatgtactgct

SEQ ID NO: 1196 - DNA, 20 bp, Artificial sequence
  Synthetic oligonucleotide
actcctcagatatgtactgc

SEQ ID NO: 1197 - DNA, 20 bp, Artificial sequence
  Synthetic oligonucleotide
cgactcctcagatatgtact

SEQ ID NO: 1198 - DNA, 20 bp, Artificial sequence
  Synthetic oligonucleotide
tcgactcctcagatatgtac

SEQ ID NO: 1199 - DNA, 20 bp, Artificial sequence
  Synthetic oligonucleotide
gtcgactcctcagatatgta

SEQ ID NO: 1200 - DNA, 20 bp, Artificial sequence
  Synthetic oligonucleotide
ggtcgactcctcagatatgt

SEQ ID NO: 1201 - DNA, 20 bp, Artificial sequence
  Synthetic oligonucleotide
gggtcgactcctcagatatg

SEQ ID NO: 1202 - DNA, 20 bp, Artificial sequence
  Synthetic oligonucleotide
agggtcgactcctcagatat

SEQ ID NO: 1203 - DNA, 20 bp, Artificial sequence
  Synthetic oligonucleotide
acttcactctgctggcctga

SEQ ID NO: 1204 - DNA, 20 bp, Artificial sequence
  Synthetic oligonucleotide
atggagccaggcacttcact

SEQ ID NO: 1205 - DNA, 20 bp, Artificial sequence
  Synthetic oligonucleotide
aatggagccaggcacttcac

SEQ ID NO: 1206 - DNA, 20 bp, Artificial sequence
  Synthetic oligonucleotide
gaatggagccaggcacttca

SEQ ID NO: 1207 - DNA, 20 bp, Artificial sequence
  Synthetic oligonucleotide
tggaatggagccaggcactt

SEQ ID NO: 1208 - DNA, 20 bp, Artificial sequence
  Synthetic oligonucleotide
tttggaatggagccaggcac

SEQ ID NO: 1209 - DNA, 20 bp, Artificial sequence
  Synthetic oligonucleotide
gtttggaatggagccaggca

SEQ ID NO: 1210 - DNA, 20 bp, Artificial sequence
  Synthetic oligonucleotide
agtttggaatggagccaggc

SEQ ID NO: 1211 - DNA, 20 bp, Artificial sequence
  Synthetic oligonucleotide
gagtttggaatggagccagg

SEQ ID NO: 1212 - DNA, 20 bp, Artificial sequence
  Synthetic oligonucleotide
ggagtttggaatggagccag

SEQ ID NO: 1213 - DNA, 20 bp, Artificial sequence
  Synthetic oligonucleotide
aggagtttggaatggagcca

SEQ ID NO: 1214 - DNA, 20 bp, Artificial sequence
  Synthetic oligonucleotide
caggagtttggaatggagcc

SEQ ID NO: 1215 - DNA, 20 bp, Artificial sequence
  Synthetic oligonucleotide
agtccacttccaggagtttg

SEQ ID NO: 1216 - DNA, 20 bp, Artificial sequence
  Synthetic oligonucleotide
cagtccacttccaggagttt

SEQ ID NO: 1217 - DNA, 20 bp, Artificial sequence
  Synthetic oligonucleotide
acagtccacttccaggagtt

SEQ ID NO: 1218 - DNA, 20 bp, Artificial sequence
  Synthetic oligonucleotide
tccacagtccacttccagga

SEQ ID NO: 1219 - DNA, 20 bp, Artificial sequence
  Synthetic oligonucleotide
ttccacagtccacttccagg

SEQ ID NO: 1220 - DNA, 20 bp, Artificial sequence
  Synthetic oligonucleotide
gttccacagtccacttccag

SEQ ID NO: 1221 - DNA, 20 bp, Artificial sequence
  Synthetic oligonucleotide
tgttccacagtccacttcca

SEQ ID NO: 1222 - DNA, 20 bp, Artificial sequence
  Synthetic oligonucleotide
gtgttccacagtccacttcc

SEQ ID NO: 1223 - DNA, 20 bp, Artificial sequence
  Synthetic oligonucleotide
tgtgttccacagtccacttc

SEQ ID NO: 1224 - DNA, 20 bp, Artificial sequence
  Synthetic oligonucleotide
ttatagacaatgtgttccac

SEQ ID NO: 1225 - DNA, 20 bp, Artificial sequence
  Synthetic oligonucleotide
tttatagacaatgtgttcca

SEQ ID NO: 1226 - DNA, 20 bp, Artificial sequence
  Synthetic oligonucleotide
ctttatagacaatgtgttcc

SEQ ID NO: 1227 - DNA, 20 bp, Artificial sequence
  Synthetic oligonucleotide
gctttatagacaatgtgttc

SEQ ID NO: 1228 - DNA, 20 bp, Artificial sequence
  Synthetic oligonucleotide
ggctttatagacaatgtgtt

SEQ ID NO: 1229 - DNA, 20 bp, Artificial sequence
  Synthetic oligonucleotide
aggctttatagacaatgtgt

SEQ ID NO: 1230 - DNA, 20 bp, Artificial sequence
  Synthetic oligonucleotide
aaggctttatagacaatgtg

SEQ ID NO: 1231 - DNA, 20 bp, Artificial sequence
  Synthetic oligonucleotide
caaggctttatagacaatgt

SEQ ID NO: 1232 - DNA, 20 bp, Artificial sequence
  Synthetic oligonucleotide
gcaaggctttatagacaatg

SEQ ID NO: 1233 - DNA, 20 bp, Artificial sequence
  Synthetic oligonucleotide
cgcaaggctttatagacaat

SEQ ID NO: 1234 - DNA, 20 bp, Artificial sequence
  Synthetic oligonucleotide
aaatgtttaggaggcagaat

SEQ ID NO: 1235 - DNA, 20 bp, Artificial sequence
  Synthetic oligonucleotide
gaaatgtttaggaggcagaa

SEQ ID NO: 1236 - DNA, 20 bp, Artificial sequence
  Synthetic oligonucleotide
tgaaatgtttaggaggcaga

SEQ ID NO: 1237 - DNA, 20 bp, Artificial sequence
  Synthetic oligonucleotide
gtgaaatgtttaggaggcag

SEQ ID NO: 1238 - DNA, 20 bp, Artificial sequence
  Synthetic oligonucleotide
tgtgaaatgtttaggaggca

SEQ ID NO: 1239 - DNA, 20 bp, Artificial sequence
  Synthetic oligonucleotide
ctgtgaaatgtttaggaggc

SEQ ID NO: 1240 - DNA, 20 bp, Artificial sequence
  Synthetic oligonucleotide
tctgtgaaatgtttaggagg

SEQ ID NO: 1241 - DNA, 20 bp, Artificial sequence
  Synthetic oligonucleotide
ttctgtgaaatgtttaggag

SEQ ID NO: 1242 - DNA, 20 bp, Artificial sequence
  Synthetic oligonucleotide
cttctgtgaaatgtttagga

SEQ ID NO: 1243 - DNA, 20 bp, Artificial sequence
  Synthetic oligonucleotide
tcttctgtgaaatgtttagg

SEQ ID NO: 1244 - DNA, 20 bp, Artificial sequence
  Synthetic oligonucleotide
atcttctgtgaaatgtttag

SEQ ID NO: 1245 - DNA, 20 bp, Artificial sequence
  Synthetic oligonucleotide
catcttctgtgaaatgttta

SEQ ID NO: 1246 - DNA, 20 bp, Artificial sequence
  Synthetic oligonucleotide
ccatcttctgtgaaatgttt

SEQ ID NO: 1247 - DNA, 20 bp, Artificial sequence
  Synthetic oligonucleotide
tccatcttctgtgaaatgtt

SEQ ID NO: 1248 - DNA, 20 bp, Artificial sequence
  Synthetic oligonucleotide
ttccatcttctgtgaaatgt

SEQ ID NO: 1249 - DNA, 20 bp, Artificial sequence
  Synthetic oligonucleotide
tttccatcttctgtgaaatg

SEQ ID NO: 1250 - DNA, 20 bp, Artificial sequence
  Synthetic oligonucleotide
atttccatcttctgtgaaat

SEQ ID NO: 1251 - DNA, 20 bp, Artificial sequence
  Synthetic oligonucleotide
tatttccatcttctgtgaaa

SEQ ID NO: 1252 - DNA, 20 bp, Artificial sequence
  Synthetic oligonucleotide
atatttccatcttctgtgaa

SEQ ID NO: 1253 - DNA, 20 bp, Artificial sequence
  Synthetic oligonucleotide
gatatttccatcttctgtga

SEQ ID NO: 1254 - DNA, 20 bp, Artificial sequence
  Synthetic oligonucleotide
gatcaggcaggttagcaagc

SEQ ID NO: 1255 - DNA, 20 bp, Artificial sequence
  Synthetic oligonucleotide
agatcaggcaggttagcaag

SEQ ID NO: 1256 - DNA, 20 bp, Artificial sequence
  Synthetic oligonucleotide
tagatcaggcaggttagcaa

SEQ ID NO: 1257 - DNA, 20 bp, Artificial sequence
  Synthetic oligonucleotide
atagatcaggcaggttagca

SEQ ID NO: 1258 - DNA, 20 bp, Artificial sequence
  Synthetic oligonucleotide
tatagatcaggcaggttagc

SEQ ID NO: 1259 - DNA, 20 bp, Artificial sequence
  Synthetic oligonucleotide
gtatagatcaggcaggttag

SEQ ID NO: 1260 - DNA, 20 bp, Artificial sequence
  Synthetic oligonucleotide
tgtatagatcaggcaggtta

SEQ ID NO: 1261 - DNA, 20 bp, Artificial sequence
  Synthetic oligonucleotide
ttgtatagatcaggcaggtt

SEQ ID NO: 1262 - DNA, 20 bp, Artificial sequence
  Synthetic oligonucleotide
tttgtatagatcaggcaggt

SEQ ID NO: 1263 - DNA, 20 bp, Artificial sequence
  Synthetic oligonucleotide
ctttgtatagatcaggcagg

SEQ ID NO: 1264 - DNA, 20 bp, Artificial sequence
  Synthetic oligonucleotide
actttgtatagatcaggcag

SEQ ID NO: 1265 - DNA, 20 bp, Artificial sequence
  Synthetic oligonucleotide
gactttgtatagatcaggca

SEQ ID NO: 1266 - DNA, 20 bp, Artificial sequence
  Synthetic oligonucleotide
agactttgtatagatcaggc

SEQ ID NO: 1267 - DNA, 20 bp, Artificial sequence
  Synthetic oligonucleotide
aagactttgtatagatcagg

SEQ ID NO: 1268 - DNA, 20 bp, Artificial sequence
  Synthetic oligonucleotide
aaagactttgtatagatcag

SEQ ID NO: 1269 - DNA, 20 bp, Artificial sequence
  Synthetic oligonucleotide
caaagactttgtatagatca

SEQ ID NO: 1270 - DNA, 20 bp, Artificial sequence
  Synthetic oligonucleotide
taacacctctcaaagacttt

SEQ ID NO: 1271 - DNA, 20 bp, Artificial sequence
  Synthetic oligonucleotide
ttaacacctctcaaagactt

SEQ ID NO: 1272 - DNA, 20 bp, Artificial sequence
  Synthetic oligonucleotide
tttaacacctctcaaagact

SEQ ID NO: 1273 - DNA, 20 bp, Artificial sequence
  Synthetic oligonucleotide
atttaacacctctcaaagac

SEQ ID NO: 1274 - DNA, 20 bp, Artificial sequence
  Synthetic oligonucleotide
tatttaacacctctcaaaga

SEQ ID NO: 1275 - DNA, 20 bp, Artificial sequence
  Synthetic oligonucleotide
atatttaacacctctcaaag

SEQ ID NO: 1276 - DNA, 20 bp, Artificial sequence
  Synthetic oligonucleotide
catatttaacacctctcaaa

SEQ ID NO: 1277 - DNA, 20 bp, Artificial sequence
  Synthetic oligonucleotide
ccatatttaacacctctcaa

SEQ ID NO: 1278 - DNA, 20 bp, Artificial sequence
  Synthetic oligonucleotide
accatatttaacacctctca

SEQ ID NO: 1279 - DNA, 20 bp, Artificial sequence
  Synthetic oligonucleotide
aaccatatttaacacctctc

SEQ ID NO: 1280 - DNA, 20 bp, Artificial sequence
  Synthetic oligonucleotide
taaccatatttaacacctct

SEQ ID NO: 1281 - DNA, 20 bp, Artificial sequence
  Synthetic oligonucleotide
ataaccatatttaacacctc

SEQ ID NO: 1282 - DNA, 20 bp, Artificial sequence
  Synthetic oligonucleotide
aataaccatatttaacacct

SEQ ID NO: 1283 - DNA, 20 bp, Artificial sequence
  Synthetic oligonucleotide
aaataaccatatttaacacc

SEQ ID NO: 1284 - DNA, 20 bp, Artificial sequence
  Synthetic oligonucleotide
agtgcataaataaccatatt

SEQ ID NO: 1285 - DNA, 20 bp, Artificial sequence
  Synthetic oligonucleotide
cagtgcataaataaccatat

SEQ ID NO: 1286 - DNA, 20 bp, Artificial sequence
  Synthetic oligonucleotide
acagtgcataaataaccata

SEQ ID NO: 1287 - DNA, 20 bp, Artificial sequence
  Synthetic oligonucleotide
cacagtgcataaataaccat

SEQ ID NO: 1288 - DNA, 20 bp, Artificial sequence
  Synthetic oligonucleotide
ccacagtgcataaataacca

SEQ ID NO: 1289 - DNA, 20 bp, Artificial sequence
  Synthetic oligonucleotide
cccacagtgcataaataacc

SEQ ID NO: 1290 - DNA, 20 bp, Artificial sequence
  Synthetic oligonucleotide
tcccacagtgcataaataac

SEQ ID NO: 1291 - DNA, 20 bp, Artificial sequence
  Synthetic oligonucleotide
atcccacagtgcataaataa

SEQ ID NO: 1292 - DNA, 20 bp, Artificial sequence
  Synthetic oligonucleotide
catcccacagtgcataaata

SEQ ID NO: 1293 - DNA, 20 bp, Artificial sequence
  Synthetic oligonucleotide
acatcccacagtgcataaat

SEQ ID NO: 1294 - DNA, 20 bp, Artificial sequence
  Synthetic oligonucleotide
cacatcccacagtgcataaa

SEQ ID NO: 1295 - DNA, 20 bp, Artificial sequence
  Synthetic oligonucleotide
agaagaacacatcccacagt

SEQ ID NO: 1296 - DNA, 20 bp, Artificial sequence
  Synthetic oligonucleotide
aagaagaacacatcccacag

SEQ ID NO: 1297 - DNA, 20 bp, Artificial sequence
  Synthetic oligonucleotide
aaagaagaacacatcccaca

SEQ ID NO: 1298 - DNA, 20 bp, Artificial sequence
  Synthetic oligonucleotide
gaaagaagaacacatcccac

SEQ ID NO: 1299 - DNA, 20 bp, Artificial sequence
  Synthetic oligonucleotide
agaaagaagaacacatccca

SEQ ID NO: 1300 - DNA, 20 bp, Artificial sequence
  Synthetic oligonucleotide
gagaaagaagaacacatccc

SEQ ID NO: 1301 - DNA, 20 bp, Artificial sequence
  Synthetic oligonucleotide
agagaaagaagaacacatcc

SEQ ID NO: 1302 - DNA, 20 bp, Artificial sequence
  Synthetic oligonucleotide
cagagaaagaagaacacatc

SEQ ID NO: 1303 - DNA, 20 bp, Artificial sequence
  Synthetic oligonucleotide
acagagaaagaagaacacat

SEQ ID NO: 1304 - DNA, 20 bp, Artificial sequence
  Synthetic oligonucleotide
tacagagaaagaagaacaca

SEQ ID NO: 1305 - DNA, 20 bp, Artificial sequence
  Synthetic oligonucleotide
atacagagaaagaagaacac

SEQ ID NO: 1306 - DNA, 20 bp, Artificial sequence
  Synthetic oligonucleotide
aatacagagaaagaagaaca

SEQ ID NO: 1307 - DNA, 20 bp, Artificial sequence
  Synthetic oligonucleotide
gaatacagagaaagaagaac

SEQ ID NO: 1308 - DNA, 20 bp, Artificial sequence
  Synthetic oligonucleotide
ggaatacagagaaagaagaa

SEQ ID NO: 1309 - DNA, 20 bp, Artificial sequence
  Synthetic oligonucleotide
cggaatacagagaaagaaga

SEQ ID NO: 1310 - DNA, 20 bp, Artificial sequence
  Synthetic oligonucleotide
tcggaatacagagaaagaag

SEQ ID NO: 1311 - DNA, 20 bp, Artificial sequence
  Synthetic oligonucleotide
atcggaatacagagaaagaa

SEQ ID NO: 1312 - DNA, 20 bp, Artificial sequence
  Synthetic oligonucleotide
tatcggaatacagagaaaga

SEQ ID NO: 1313 - DNA, 20 bp, Artificial sequence
  Synthetic oligonucleotide
gtatcggaatacagagaaag

SEQ ID NO: 1314 - DNA, 20 bp, Artificial sequence
  Synthetic oligonucleotide
caacactttgtatcggaata

SEQ ID NO: 1315 - DNA, 20 bp, Artificial sequence
  Synthetic oligonucleotide
acactttgatacaacacttt

SEQ ID NO: 1316 - DNA, 20 bp, Artificial sequence
  Synthetic oligonucleotide
cacactttgatacaacactt

SEQ ID NO: 1317 - DNA, 20 bp, Artificial sequence
  Synthetic oligonucleotide
tcacactttgatacaacact

SEQ ID NO: 1318 - DNA, 20 bp, Artificial sequence
  Synthetic oligonucleotide
ctttgtatatcacactttga

SEQ ID NO: 1319 - DNA, 20 bp, Artificial sequence
  Synthetic oligonucleotide
actttgtatatcacactttg

SEQ ID NO: 1320 - DNA, 20 bp, Artificial sequence
  Synthetic oligonucleotide
cactttgtatatcacacttt

SEQ ID NO: 1321 - DNA, 20 bp, Artificial sequence
  Synthetic oligonucleotide
acactttgtatatcacactt

SEQ ID NO: 1322 - DNA, 20 bp, Artificial sequence
  Synthetic oligonucleotide
tacactttgtatatcacact

SEQ ID NO: 1323 - DNA, 20 bp, Artificial sequence
  Synthetic oligonucleotide
gtacactttgtatatcacac

SEQ ID NO: 1324 - DNA, 20 bp, Artificial sequence
  Synthetic oligonucleotide
ggtacactttgtatatcaca

SEQ ID NO: 1325 - DNA, 20 bp, Artificial sequence
  Synthetic oligonucleotide
tggtacactttgtatatcac

SEQ ID NO: 1326 - DNA, 20 bp, Artificial sequence
  Synthetic oligonucleotide
ttggtacactttgtatatca

SEQ ID NO: 1327 - DNA, 20 bp, Artificial sequence
  Synthetic oligonucleotide
gttggtacactttgtatatc

SEQ ID NO: 1328 - DNA, 20 bp, Artificial sequence
  Synthetic oligonucleotide
tgttggtacactttgtatat

SEQ ID NO: 1329 - DNA, 20 bp, Artificial sequence
  Synthetic oligonucleotide
atgttggtacactttgtata

SEQ ID NO: 1330 - DNA, 20 bp, Artificial sequence
  Synthetic oligonucleotide
tatgttggtacactttgtat

SEQ ID NO: 1331 - DNA, 20 bp, Artificial sequence
  Synthetic oligonucleotide
ttatgttggtacactttgta

SEQ ID NO: 1332 - DNA, 20 bp, Artificial sequence
  Synthetic oligonucleotide
cttatgttggtacactttgt

SEQ ID NO: 1333 - DNA, 20 bp, Artificial sequence
  Synthetic oligonucleotide
acttatgttggtacactttg

SEQ ID NO: 1334 - DNA, 20 bp, Artificial sequence
  Synthetic oligonucleotide
cacttatgttggtacacttt

SEQ ID NO: 1335 - DNA, 20 bp, Artificial sequence
  Synthetic oligonucleotide
acacttatgttggtacactt

SEQ ID NO: 1336 - DNA, 20 bp, Artificial sequence
  Synthetic oligonucleotide
agtcttaagtgctaccaaca

SEQ ID NO: 1337 - DNA, 20 bp, Artificial sequence
  Synthetic oligonucleotide
aagtcttaagtgctaccaac

SEQ ID NO: 1338 - DNA, 20 bp, Artificial sequence
  Synthetic oligonucleotide
taagtcttaagtgctaccaa

SEQ ID NO: 1339 - DNA, 20 bp, Artificial sequence
  Synthetic oligonucleotide
ataagtcttaagtgctacca

SEQ ID NO: 1340 - DNA, 20 bp, Artificial sequence
  Synthetic oligonucleotide
tataagtcttaagtgctacc

SEQ ID NO: 1341 - DNA, 20 bp, Artificial sequence
  Synthetic oligonucleotide
gtataagtcttaagtgctac

SEQ ID NO: 1342 - DNA, 20 bp, Artificial sequence
  Synthetic oligonucleotide
agtataagtcttaagtgcta

SEQ ID NO: 1343 - DNA, 20 bp, Artificial sequence
  Synthetic oligonucleotide
aagtataagtcttaagtgct

SEQ ID NO: 1344 - DNA, 20 bp, Artificial sequence
  Synthetic oligonucleotide
caagtataagtcttaagtgc

SEQ ID NO: 1345 - DNA, 20 bp, Artificial sequence
  Synthetic oligonucleotide
gcaagtataagtcttaagtg

SEQ ID NO: 1346 - DNA, 20 bp, Artificial sequence
  Synthetic oligonucleotide
ggcaagtataagtcttaagt

SEQ ID NO: 1347 - DNA, 20 bp, Artificial sequence
  Synthetic oligonucleotide
aggcaagtataagtcttaag

SEQ ID NO: 1348 - DNA, 20 bp, Artificial sequence
  Synthetic oligonucleotide
aaggcaagtataagtcttaa

SEQ ID NO: 1349 - DNA, 20 bp, Artificial sequence
  Synthetic oligonucleotide
gaaggcaagtataagtctta

SEQ ID NO: 1350 - DNA, 20 bp, Artificial sequence
  Synthetic oligonucleotide
agaaggcaagtataagtctt

SEQ ID NO: 1351 - DNA, 20 bp, Artificial sequence
  Synthetic oligonucleotide
cagaaggcaagtataagtct

SEQ ID NO: 1352 - DNA, 20 bp, Artificial sequence
  Synthetic oligonucleotide
tcagaaggcaagtataagtc

SEQ ID NO: 1353 - DNA, 20 bp, Artificial sequence
  Synthetic oligonucleotide
atcagaaggcaagtataagt

SEQ ID NO: 1354 - DNA, 20 bp, Artificial sequence
  Synthetic oligonucleotide
tatcagaaggcaagtataag

SEQ ID NO: 1355 - DNA, 20 bp, Artificial sequence
  Synthetic oligonucleotide
ctatcagaaggcaagtataa

SEQ ID NO: 1356 - DNA, 20 bp, Artificial sequence
  Synthetic oligonucleotide
actatcagaaggcaagtata

SEQ ID NO: 1357 - DNA, 20 bp, Artificial sequence
  Synthetic oligonucleotide
tactatcagaaggcaagtat

SEQ ID NO: 1358 - DNA, 20 bp, Artificial sequence
  Synthetic oligonucleotide
atactatcagaaggcaagta

SEQ ID NO: 1359 - DNA, 20 bp, Artificial sequence
  Synthetic oligonucleotide
aatactatcagaaggcaagt

SEQ ID NO: 1360 - DNA, 20 bp, Artificial sequence
  Synthetic oligonucleotide
gaatactatcagaaggcaag

SEQ ID NO: 1361 - DNA, 20 bp, Artificial sequence
  Synthetic oligonucleotide
ggaatactatcagaaggcaa

SEQ ID NO: 1362 - DNA, 20 bp, Artificial sequence
  Synthetic oligonucleotide
aggaatactatcagaaggca

SEQ ID NO: 1363 - DNA, 20 bp, Artificial sequence
  Synthetic oligonucleotide
aaggaatactatcagaaggc

SEQ ID NO: 1364 - DNA, 20 bp, Artificial sequence
  Synthetic oligonucleotide
aaaggaatactatcagaagg

SEQ ID NO: 1365 - DNA, 20 bp, Artificial sequence
  Synthetic oligonucleotide
taaaggaatactatcagaag

SEQ ID NO: 1366 - DNA, 20 bp, Artificial sequence
  Synthetic oligonucleotide
ataaaggaatactatcagaa

SEQ ID NO: 1367 - DNA, 20 bp, Artificial sequence
  Synthetic oligonucleotide
tataaaggaatactatcaga

SEQ ID NO: 1368 - DNA, 20 bp, Artificial sequence
  Synthetic oligonucleotide
gtataaaggaatactatcag

SEQ ID NO: 1369 - DNA, 20 bp, Artificial sequence
  Synthetic oligonucleotide
tgtataaaggaatactatca

SEQ ID NO: 1370 - DNA, 20 bp, Artificial sequence
  Synthetic oligonucleotide
gtgtataaaggaatactatc

SEQ ID NO: 1371 - DNA, 20 bp, Artificial sequence
  Synthetic oligonucleotide
tgtgtataaaggaatactat

SEQ ID NO: 1372 - DNA, 20 bp, Artificial sequence
  Synthetic oligonucleotide
ctgtgtataaaggaatacta

SEQ ID NO: 1373 - DNA, 20 bp, Artificial sequence
  Synthetic oligonucleotide
actgtgtataaaggaatact

SEQ ID NO: 1374 - DNA, 20 bp, Artificial sequence
  Synthetic oligonucleotide
cactgtgtataaaggaatac

SEQ ID NO: 1375 - DNA, 20 bp, Artificial sequence
  Synthetic oligonucleotide
ccactgtgtataaaggaata

SEQ ID NO: 1376 - DNA, 20 bp, Artificial sequence
  Synthetic oligonucleotide
tccactgtgtataaaggaat

SEQ ID NO: 1377 - DNA, 20 bp, Artificial sequence
  Synthetic oligonucleotide
atccactgtgtataaaggaa

SEQ ID NO: 1378 - DNA, 20 bp, Artificial sequence
  Synthetic oligonucleotide
aatccactgtgtataaagga

SEQ ID NO: 1379 - DNA, 20 bp, Artificial sequence
  Synthetic oligonucleotide
caatccactgtgtataaagg

SEQ ID NO: 1380 - DNA, 20 bp, Artificial sequence
  Synthetic oligonucleotide
tcaatccactgtgtataaag

SEQ ID NO: 1381 - DNA, 20 bp, Artificial sequence
  Synthetic oligonucleotide
atcaatccactgtgtataaa

SEQ ID NO: 1382 - DNA, 20 bp, Artificial sequence
  Synthetic oligonucleotide
aatcaatccactgtgtataa

SEQ ID NO: 1383 - DNA, 20 bp, Artificial sequence
  Synthetic oligonucleotide
taatcaatccactgtgtata

SEQ ID NO: 1384 - DNA, 20 bp, Artificial sequence
  Synthetic oligonucleotide
ataatcaatccactgtgtat

SEQ ID NO: 1385 - DNA, 20 bp, Artificial sequence
  Synthetic oligonucleotide
tataatcaatccactgtgta

SEQ ID NO: 1386 - DNA, 20 bp, Artificial sequence
  Synthetic oligonucleotide
ttataatcaatccactgtgt

SEQ ID NO: 1387 - DNA, 20 bp, Artificial sequence
  Synthetic oligonucleotide
tttataatcaatccactgtg

SEQ ID NO: 1388 - DNA, 20 bp, Artificial sequence
  Synthetic oligonucleotide
atttataatcaatccactgt

SEQ ID NO: 1389 - DNA, 20 bp, Artificial sequence
  Synthetic oligonucleotide
tatttataatcaatccactg

SEQ ID NO: 1390 - DNA, 20 bp, Artificial sequence
  Synthetic oligonucleotide
gttaagacacatctatttat

SEQ ID NO: 1391 - DNA, 20 bp, Artificial sequence
  Synthetic oligonucleotide
tgttaagacacatctattta

SEQ ID NO: 1392 - DNA, 20 bp, Artificial sequence
  Synthetic oligonucleotide
atgttaagacacatctattt

SEQ ID NO: 1393 - DNA, 20 bp, Artificial sequence
  Synthetic oligonucleotide
tatgttaagacacatctatt

SEQ ID NO: 1394 - RNA, 19 nt, Artificial Sequence
  Synthetic oligonucleotide
gagacccagcaacccacaa

SEQ ID NO: 1395 - RNA, 19 nt, Artificial Sequence
  Synthetic oligonucleotide
uuguggguugcugggucuc

SEQ ID NO: 1396 - RNA, 19 nt, Artificial Sequence
  Synthetic oligonucleotide
cccagcaacccacagagua

SEQ ID NO: 1397 - RNA, 19 nt, Artificial Sequence
  Synthetic oligonucleotide
uacucuguggguugcuggg

SEQ ID NO: 1398 - RNA, 19 nt, Artificial Sequence
  Synthetic oligonucleotide
ccagcaacccacagaguua

SEQ ID NO: 1399 - RNA, 19 nt, Artificial Sequence
  Synthetic oligonucleotide
uaacucuguggguugcugg

SEQ ID NO: 1400 - RNA, 19 nt, Artificial Sequence
  Synthetic oligonucleotide
cagcaacccacagaguuga

SEQ ID NO: 1401 - RNA, 19 nt, Artificial Sequence
  Synthetic oligonucleotide
ucaacucuguggguugcug

SEQ ID NO: 1402 - RNA, 19 nt, Artificial Sequence
  Synthetic oligonucleotide
caacccacagaguugagaa

SEQ ID NO: 1403 - RNA, 19 nt, Artificial Sequence
  Synthetic oligonucleotide
uucucaacucuguggguug

SEQ ID NO: 1404 - RNA, 19 nt, Artificial Sequence
  Synthetic oligonucleotide
aacccacagaguugagaaa

SEQ ID NO: 1405 - RNA, 19 nt, Artificial Sequence
  Synthetic oligonucleotide
uuucucaacucuguggguu

SEQ ID NO: 1406 - RNA, 19 nt, Artificial Sequence
  Synthetic oligonucleotide
acccacagaguugagaaaa

SEQ ID NO: 1407 - RNA, 19 nt, Artificial Sequence
  Synthetic oligonucleotide
uuuucucaacucugugggu

SEQ ID NO: 1408 - RNA, 19 nt, Artificial Sequence
  Synthetic oligonucleotide
cccacagaguugagaaaua

SEQ ID NO: 1409 - RNA, 19 nt, Artificial Sequence
  Synthetic oligonucleotide
uauuucucaacucuguggg

SEQ ID NO: 1410 - RNA, 19 nt, Artificial Sequence
  Synthetic oligonucleotide
cacagaguugagaaauuua

SEQ ID NO: 1411 - RNA, 19 nt, Artificial Sequence
  Synthetic oligonucleotide
uaaauuucucaacucugug

SEQ ID NO: 1412 - RNA, 19 nt, Artificial Sequence
  Synthetic oligonucleotide
acagaguugagaaauuuga

SEQ ID NO: 1413 - RNA, 19 nt, Artificial Sequence
  Synthetic oligonucleotide
ucaaauuucucaacucugu

SEQ ID NO: 1414 - RNA, 19 nt, Artificial Sequence
  Synthetic oligonucleotide
gaguugagaaauuugacua

SEQ ID NO: 1415 - RNA, 19 nt, Artificial Sequence
  Synthetic oligonucleotide
uagucaaauuucucaacuc

SEQ ID NO: 1416 - RNA, 19 nt, Artificial Sequence
  Synthetic oligonucleotide
aguugagaaauuugacuga

SEQ ID NO: 1417 - RNA, 19 nt, Artificial Sequence
  Synthetic oligonucleotide
ucagucaaauuucucaacu

SEQ ID NO: 1418 - RNA, 19 nt, Artificial Sequence
  Synthetic oligonucleotide
guugagaaauuugacugga

SEQ ID NO: 1419 - RNA, 19 nt, Artificial Sequence
  Synthetic oligonucleotide
uccagucaaauuucucaac

SEQ ID NO: 1420 - RNA, 19 nt, Artificial Sequence
  Synthetic oligonucleotide
gagaaauuugacuggcaua

SEQ ID NO: 1421 - RNA, 19 nt, Artificial Sequence
  Synthetic oligonucleotide
uaugccagucaaauuucuc

SEQ ID NO: 1422 - RNA, 19 nt, Artificial Sequence
  Synthetic oligonucleotide
aaauuugacuggcauucaa

SEQ ID NO: 1423 - RNA, 19 nt, Artificial Sequence
  Synthetic oligonucleotide
uugaaugccagucaaauuu

SEQ ID NO: 1424 - RNA, 19 nt, Artificial Sequence
  Synthetic oligonucleotide
uugacuggcauucaagcua

SEQ ID NO: 1425 - RNA, 19 nt, Artificial Sequence
  Synthetic oligonucleotide
uagcuugaaugccagucaa

SEQ ID NO: 1426 - RNA, 19 nt, Artificial Sequence
  Synthetic oligonucleotide
acuggcauucaagcuguca

SEQ ID NO: 1427 - RNA, 19 nt, Artificial Sequence
  Synthetic oligonucleotide
ugacagcuugaaugccagu

SEQ ID NO: 1428 - RNA, 19 nt, Artificial Sequence
  Synthetic oligonucleotide
ggcauucaagcuguccaaa

SEQ ID NO: 1429 - RNA, 19 nt, Artificial Sequence
  Synthetic oligonucleotide
uuuggacagcuugaaugcc

SEQ ID NO: 1430 - RNA, 19 nt, Artificial Sequence
  Synthetic oligonucleotide
gcauucaagcuguccaaua

SEQ ID NO: 1431 - RNA, 19 nt, Artificial Sequence
  Synthetic oligonucleotide
uauuggacagcuugaaugc

SEQ ID NO: 1432 - RNA, 19 nt, Artificial Sequence
  Synthetic oligonucleotide
cauucaagcuguccaauca

SEQ ID NO: 1433 - RNA, 19 nt, Artificial Sequence
  Synthetic oligonucleotide
ugauuggacagcuugaaug

SEQ ID NO: 1434 - RNA, 19 nt, Artificial Sequence
  Synthetic oligonucleotide
uucaagcuguccaaucaaa

SEQ ID NO: 1435 - RNA, 19 nt, Artificial Sequence
  Synthetic oligonucleotide
uuugauuggacagcuugaa

SEQ ID NO: 1436 - RNA, 19 nt, Artificial Sequence
  Synthetic oligonucleotide
ucaagcuguccaaucaaua

SEQ ID NO: 1437 - RNA, 19 nt, Artificial Sequence
  Synthetic oligonucleotide
uauugauuggacagcuuga

SEQ ID NO: 1438 - RNA, 19 nt, Artificial Sequence
  Synthetic oligonucleotide
agcuguccaaucaauagca

SEQ ID NO: 1439 - RNA, 19 nt, Artificial Sequence
  Synthetic oligonucleotide
ugcuauugauuggacagcu

SEQ ID NO: 1440 - RNA, 19 nt, Artificial Sequence
  Synthetic oligonucleotide
gcuguccaaucaauagcua

SEQ ID NO: 1441 - RNA, 19 nt, Artificial Sequence
  Synthetic oligonucleotide
uagcuauugauuggacagc

SEQ ID NO: 1442 - RNA, 19 nt, Artificial Sequence
  Synthetic oligonucleotide
cuguccaaucaauagcuga

SEQ ID NO: 1443 - RNA, 19 nt, Artificial Sequence
  Synthetic oligonucleotide
ucagcuauugauuggacag

SEQ ID NO: 1444 - RNA, 19 nt, Artificial Sequence
  Synthetic oligonucleotide
uguccaaucaauagcugca

SEQ ID NO: 1445 - RNA, 19 nt, Artificial Sequence
  Synthetic oligonucleotide
ugcagcuauugauuggaca

SEQ ID NO: 1446 - RNA, 19 nt, Artificial Sequence
  Synthetic oligonucleotide
uagcugccgcugaagggua

SEQ ID NO: 1447 - RNA, 19 nt, Artificial Sequence
  Synthetic oligonucleotide
uacccuucagcggcagcua

SEQ ID NO: 1448 - RNA, 19 nt, Artificial Sequence
  Synthetic oligonucleotide
uggggcuggauggcguaaa

SEQ ID NO: 1449 - RNA, 19 nt, Artificial Sequence
  Synthetic oligonucleotide
uuuacgccauccagcccca

SEQ ID NO: 1450 - RNA, 19 nt, Artificial Sequence
  Synthetic oligonucleotide
uggauggcguaagcuacaa

SEQ ID NO: 1451 - RNA, 19 nt, Artificial Sequence
  Synthetic oligonucleotide
uuguagcuuacgccaucca

SEQ ID NO: 1452 - RNA, 19 nt, Artificial Sequence
  Synthetic oligonucleotide
ggauggcguaagcuacaga

SEQ ID NO: 1453 - RNA, 19 nt, Artificial Sequence
  Synthetic oligonucleotide
ucuguagcuuacgccaucc

SEQ ID NO: 1454 - RNA, 19 nt, Artificial Sequence
  Synthetic oligonucleotide
auggcguaagcuacagcua

SEQ ID NO: 1455 - RNA, 19 nt, Artificial Sequence
  Synthetic oligonucleotide
uagcuguagcuuacgccau

SEQ ID NO: 1456 - RNA, 19 nt, Artificial Sequence
  Synthetic oligonucleotide
ggcguaagcuacagcugaa

SEQ ID NO: 1457 - RNA, 19 nt, Artificial Sequence
  Synthetic oligonucleotide
uucagcuguagcuuacgcc

SEQ ID NO: 1458 - RNA, 19 nt, Artificial Sequence
  Synthetic oligonucleotide
gcguaagcuacagcugaaa

SEQ ID NO: 1459 - RNA, 19 nt, Artificial Sequence
  Synthetic oligonucleotide
uuucagcuguagcuuacgc

SEQ ID NO: 1460 - RNA, 19 nt, Artificial Sequence
  Synthetic oligonucleotide
cguaagcuacagcugaaga

SEQ ID NO: 1461 - RNA, 19 nt, Artificial Sequence
  Synthetic oligonucleotide
ucuucagcuguagcuuacg

SEQ ID NO: 1462 - RNA, 19 nt, Artificial Sequence
  Synthetic oligonucleotide
aagcuacagcugaaggaaa

SEQ ID NO: 1463 - RNA, 19 nt, Artificial Sequence
  Synthetic oligonucleotide
uuuccuucagcuguagcuu

SEQ ID NO: 1464 - RNA, 19 nt, Artificial Sequence
  Synthetic oligonucleotide
cuacagcugaaggaagaaa

SEQ ID NO: 1465 - RNA, 19 nt, Artificial Sequence
  Synthetic oligonucleotide
uuucuuccuucagcuguag

SEQ ID NO: 1466 - RNA, 19 nt, Artificial Sequence
  Synthetic oligonucleotide
agcugaaggaagaacguga

SEQ ID NO: 1467 - RNA, 19 nt, Artificial Sequence
  Synthetic oligonucleotide
ucacguucuuccuucagcu

SEQ ID NO: 1468 - RNA, 19 nt, Artificial Sequence
  Synthetic oligonucleotide
gcugaaggaagaacgugaa

SEQ ID NO: 1469 - RNA, 19 nt, Artificial Sequence
  Synthetic oligonucleotide
uucacguucuuccuucagc

SEQ ID NO: 1470 - RNA, 19 nt, Artificial Sequence
  Synthetic oligonucleotide
acgaggcacugaggugaua

SEQ ID NO: 1471 - RNA, 19 nt, Artificial Sequence
  Synthetic oligonucleotide
uaucaccucagugccucgu

SEQ ID NO: 1472 - RNA, 19 nt, Artificial Sequence
  Synthetic oligonucleotide
cgaggcacugaggugauua

SEQ ID NO: 1473 - RNA, 19 nt, Artificial Sequence
  Synthetic oligonucleotide
uaaucaccucagugccucg

SEQ ID NO: 1474 - RNA, 19 nt, Artificial Sequence
  Synthetic oligonucleotide
aggcacugaggugauugga

SEQ ID NO: 1475 - RNA, 19 nt, Artificial Sequence
  Synthetic oligonucleotide
uccaaucaccucagugccu

SEQ ID NO: 1476 - RNA, 19 nt, Artificial Sequence
  Synthetic oligonucleotide
ggcacugaggugauuggca

SEQ ID NO: 1477 - RNA, 19 nt, Artificial Sequence
  Synthetic oligonucleotide
ugccaaucaccucagugcc

SEQ ID NO: 1478 - RNA, 19 nt, Artificial Sequence
  Synthetic oligonucleotide
acugaggugauuggcugaa

SEQ ID NO: 1479 - RNA, 19 nt, Artificial Sequence
  Synthetic oligonucleotide
uucagccaaucaccucagu

SEQ ID NO: 1480 - RNA, 19 nt, Artificial Sequence
  Synthetic oligonucleotide
cugaggugauuggcugaaa

SEQ ID NO: 1481 - RNA, 19 nt, Artificial Sequence
  Synthetic oligonucleotide
uuucagccaaucaccucag

SEQ ID NO: 1482 - RNA, 19 nt, Artificial Sequence
  Synthetic oligonucleotide
ugaaggcacuuccguugaa

SEQ ID NO: 1483 - RNA, 19 nt, Artificial Sequence
  Synthetic oligonucleotide
uucaacggaagugccuuca

SEQ ID NO: 1484 - RNA, 19 nt, Artificial Sequence
  Synthetic oligonucleotide
aggcacuuccguugagcaa

SEQ ID NO: 1485 - RNA, 19 nt, Artificial Sequence
  Synthetic oligonucleotide
uugcucaacggaagugccu

SEQ ID NO: 1486 - RNA, 19 nt, Artificial Sequence
  Synthetic oligonucleotide
ggcacuuccguugagcaua

SEQ ID NO: 1487 - RNA, 19 nt, Artificial Sequence
  Synthetic oligonucleotide
uaugcucaacggaagugcc

SEQ ID NO: 1488 - RNA, 19 nt, Artificial Sequence
  Synthetic oligonucleotide
gcacuuccguugagcauca

SEQ ID NO: 1489 - RNA, 19 nt, Artificial Sequence
  Synthetic oligonucleotide
ugaugcucaacggaagugc

SEQ ID NO: 1490 - RNA, 19 nt, Artificial Sequence
  Synthetic oligonucleotide
cuuccguugagcaucuaga

SEQ ID NO: 1491 - RNA, 19 nt, Artificial Sequence
  Synthetic oligonucleotide
ucuagaugcucaacggaag

SEQ ID NO: 1492 - RNA, 19 nt, Artificial Sequence
  Synthetic oligonucleotide
uuccguugagcaucuagaa

SEQ ID NO: 1493 - RNA, 19 nt, Artificial Sequence
  Synthetic oligonucleotide
uucuagaugcucaacggaa

SEQ ID NO: 1494 - RNA, 19 nt, Artificial Sequence
  Synthetic oligonucleotide
ccguugagcaucuagacga

SEQ ID NO: 1495 - RNA, 19 nt, Artificial Sequence
  Synthetic oligonucleotide
ucgucuagaugcucaacgg

SEQ ID NO: 1496 - RNA, 19 nt, Artificial Sequence
  Synthetic oligonucleotide
cguugagcaucuagacgua

SEQ ID NO: 1497 - RNA, 19 nt, Artificial Sequence
  Synthetic oligonucleotide
uacgucuagaugcucaacg

SEQ ID NO: 1498 - RNA, 19 nt, Artificial Sequence
  Synthetic oligonucleotide
agcaucuagacguuuccua

SEQ ID NO: 1499 - RNA, 19 nt, Artificial Sequence
  Synthetic oligonucleotide
uaggaaacgucuagaugcu

SEQ ID NO: 1500 - RNA, 19 nt, Artificial Sequence
  Synthetic oligonucleotide
aucuagacguuuccuugga

SEQ ID NO: 1501 - RNA, 19 nt, Artificial Sequence
  Synthetic oligonucleotide
uccaaggaaacgucuagau

SEQ ID NO: 1502 - RNA, 19 nt, Artificial Sequence
  Synthetic oligonucleotide
agacguuuccuuggcucua

SEQ ID NO: 1503 - RNA, 19 nt, Artificial Sequence
  Synthetic oligonucleotide
uagagccaaggaaacgucu

SEQ ID NO: 1504 - RNA, 19 nt, Artificial Sequence
  Synthetic oligonucleotide
gacguuuccuuggcucuua

SEQ ID NO: 1505 - RNA, 19 nt, Artificial Sequence
  Synthetic oligonucleotide
uaagagccaaggaaacguc

SEQ ID NO: 1506 - RNA, 19 nt, Artificial Sequence
  Synthetic oligonucleotide
cuucuggcgccaaaaugua

SEQ ID NO: 1507 - RNA, 19 nt, Artificial Sequence
  Synthetic oligonucleotide
uacauuuuggcgccagaag

SEQ ID NO: 1508 - RNA, 19 nt, Artificial Sequence
  Synthetic oligonucleotide
uucuggcgccaaaauguca

SEQ ID NO: 1509 - RNA, 19 nt, Artificial Sequence
  Synthetic oligonucleotide
ugacauuuuggcgccagaa

SEQ ID NO: 1510 - RNA, 19 nt, Artificial Sequence
  Synthetic oligonucleotide
ucuggcgccaaaaugucga

SEQ ID NO: 1511 - RNA, 19 nt, Artificial Sequence
  Synthetic oligonucleotide
ucgacauuuuggcgccaga

SEQ ID NO: 1512 - RNA, 19 nt, Artificial Sequence
  Synthetic oligonucleotide
uggcgccaaaaugucguua

SEQ ID NO: 1513 - RNA, 19 nt, Artificial Sequence
  Synthetic oligonucleotide
uaacgacauuuuggcgcca

SEQ ID NO: 1514 - RNA, 19 nt, Artificial Sequence
  Synthetic oligonucleotide
ggcgccaaaaugucguuca

SEQ ID NO: 1515 - RNA, 19 nt, Artificial Sequence
  Synthetic oligonucleotide
ugaacgacauuuuggcgcc

SEQ ID NO: 1516 - RNA, 19 nt, Artificial Sequence
  Synthetic oligonucleotide
cgccaaaaugucguucgua

SEQ ID NO: 1517 - RNA, 19 nt, Artificial Sequence
  Synthetic oligonucleotide
uacgaacgacauuuuggcg

SEQ ID NO: 1518 - RNA, 19 nt, Artificial Sequence
  Synthetic oligonucleotide
cguucguggcagggguuaa

SEQ ID NO: 1519 - RNA, 19 nt, Artificial Sequence
  Synthetic oligonucleotide
uuaaccccugccacgaacg

SEQ ID NO: 1520 - RNA, 19 nt, Artificial Sequence
  Synthetic oligonucleotide
guucguggcagggguuaua

SEQ ID NO: 1521 - RNA, 19 nt, Artificial Sequence
  Synthetic oligonucleotide
uauaaccccugccacgaac

SEQ ID NO: 1522 - RNA, 19 nt, Artificial Sequence
  Synthetic oligonucleotide
uucguggcagggguuauua

SEQ ID NO: 1523 - RNA, 19 nt, Artificial Sequence
  Synthetic oligonucleotide
uaauaaccccugccacgaa

SEQ ID NO: 1524 - RNA, 19 nt, Artificial Sequence
  Synthetic oligonucleotide
ucguggcagggguuauuca

SEQ ID NO: 1525 - RNA, 19 nt, Artificial Sequence
  Synthetic oligonucleotide
ugaauaaccccugccacga

SEQ ID NO: 1526 - RNA, 19 nt, Artificial Sequence
  Synthetic oligonucleotide
cguggcagggguuauucga

SEQ ID NO: 1527 - RNA, 19 nt, Artificial Sequence
  Synthetic oligonucleotide
ucgaauaaccccugccacg

SEQ ID NO: 1528 - RNA, 19 nt, Artificial Sequence
  Synthetic oligonucleotide
guggcagggguuauucgga

SEQ ID NO: 1529 - RNA, 19 nt, Artificial Sequence
  Synthetic oligonucleotide
uccgaauaaccccugccac

SEQ ID NO: 1530 - RNA, 19 nt, Artificial Sequence
  Synthetic oligonucleotide
uggacgagacaguggugaa

SEQ ID NO: 1531 - RNA, 19 nt, Artificial Sequence
  Synthetic oligonucleotide
uucaccacugucucgucca

SEQ ID NO: 1532 - RNA, 19 nt, Artificial Sequence
  Synthetic oligonucleotide
ggacgagacaguggugaaa

SEQ ID NO: 1533 - RNA, 19 nt, Artificial Sequence
  Synthetic oligonucleotide
uuucaccacugucucgucc

SEQ ID NO: 1534 - RNA, 19 nt, Artificial Sequence
  Synthetic oligonucleotide
gacgagacaguggugaaca

SEQ ID NO: 1535 - RNA, 19 nt, Artificial Sequence
  Synthetic oligonucleotide
uguucaccacugucucguc

SEQ ID NO: 1536 - RNA, 19 nt, Artificial Sequence
  Synthetic oligonucleotide
uauccagcggccagcuaaa

SEQ ID NO: 1537 - RNA, 19 nt, Artificial Sequence
  Synthetic oligonucleotide
uuuagcuggccgcuggaua

SEQ ID NO: 1538 - RNA, 19 nt, Artificial Sequence
  Synthetic oligonucleotide
auccagcggccagcuaaua

SEQ ID NO: 1539 - RNA, 19 nt, Artificial Sequence
  Synthetic oligonucleotide
uauuagcuggccgcuggau

SEQ ID NO: 1540 - RNA, 19 nt, Artificial Sequence
  Synthetic oligonucleotide
uccagcggccagcuaauga

SEQ ID NO: 1541 - RNA, 19 nt, Artificial Sequence
  Synthetic oligonucleotide
ucauuagcuggccgcugga

SEQ ID NO: 1542 - RNA, 19 nt, Artificial Sequence
  Synthetic oligonucleotide
agcggccagcuaaugcuaa

SEQ ID NO: 1543 - RNA, 19 nt, Artificial Sequence
  Synthetic oligonucleotide
uuagcauuagcuggccgcu

SEQ ID NO: 1544 - RNA, 19 nt, Artificial Sequence
  Synthetic oligonucleotide
gccagcuaaugcuaucaaa

SEQ ID NO: 1545 - RNA, 19 nt, Artificial Sequence
  Synthetic oligonucleotide
uuugauagcauuagcuggc

SEQ ID NO: 1546 - RNA, 19 nt, Artificial Sequence
  Synthetic oligonucleotide
ccagcuaaugcuaucaaaa

SEQ ID NO: 1547 - RNA, 19 nt, Artificial Sequence
  Synthetic oligonucleotide
uuuugauagcauuagcugg

SEQ ID NO: 1548 - RNA, 19 nt, Artificial Sequence
  Synthetic oligonucleotide
cagcuaaugcuaucaaaga

SEQ ID NO: 1549 - RNA, 19 nt, Artificial Sequence
  Synthetic oligonucleotide
ucuuugauagcauuagcug

SEQ ID NO: 1550 - RNA, 19 nt, Artificial Sequence
  Synthetic oligonucleotide
agcuaaugcuaucaaagaa

SEQ ID NO: 1551 - RNA, 19 nt, Artificial Sequence
  Synthetic oligonucleotide
uucuuugauagcauuagcu

SEQ ID NO: 1552 - RNA, 19 nt, Artificial Sequence
  Synthetic oligonucleotide
gcuaaugcuaucaaagaga

SEQ ID NO: 1553 - RNA, 19 nt, Artificial Sequence
  Synthetic oligonucleotide
ucucuuugauagcauuagc

SEQ ID NO: 1554 - RNA, 19 nt, Artificial Sequence
  Synthetic oligonucleotide
cuaaugcuaucaaagagaa

SEQ ID NO: 1555 - RNA, 19 nt, Artificial Sequence
  Synthetic oligonucleotide
uucucuuugauagcauuag

SEQ ID NO: 1556 - RNA, 19 nt, Artificial Sequence
  Synthetic oligonucleotide
uaaugcuaucaaagagaua

SEQ ID NO: 1557 - RNA, 19 nt, Artificial Sequence
  Synthetic oligonucleotide
uaucucuuugauagcauua

SEQ ID NO: 1558 - RNA, 19 nt, Artificial Sequence
  Synthetic oligonucleotide
augcuaucaaagagaugaa

SEQ ID NO: 1559 - RNA, 19 nt, Artificial Sequence
  Synthetic oligonucleotide
uucaucucuuugauagcau

SEQ ID NO: 1560 - RNA, 19 nt, Artificial Sequence
  Synthetic oligonucleotide
gcuaucaaagagaugauua

SEQ ID NO: 1561 - RNA, 19 nt, Artificial Sequence
  Synthetic oligonucleotide
uaaucaucucuuugauagc

SEQ ID NO: 1562 - RNA, 19 nt, Artificial Sequence
  Synthetic oligonucleotide
cuaucaaagagaugauuga

SEQ ID NO: 1563 - RNA, 19 nt, Artificial Sequence
  Synthetic oligonucleotide
ucaaucaucucuuugauag

SEQ ID NO: 1564 - RNA, 19 nt, Artificial Sequence
  Synthetic oligonucleotide
gagaugauugagaacugua

SEQ ID NO: 1565 - RNA, 19 nt, Artificial Sequence
  Synthetic oligonucleotide
uacaguucucaaucaucuc

SEQ ID NO: 1566 - RNA, 19 nt, Artificial Sequence
  Synthetic oligonucleotide
agaugauugagaacuguua

SEQ ID NO: 1567 - RNA, 19 nt, Artificial Sequence
  Synthetic oligonucleotide
uaacaguucucaaucaucu

SEQ ID NO: 1568 - RNA, 19 nt, Artificial Sequence
  Synthetic oligonucleotide
gaugauugagaacuguuua

SEQ ID NO: 1569 - RNA, 19 nt, Artificial Sequence
  Synthetic oligonucleotide
uaaacaguucucaaucauc

SEQ ID NO: 1570 - RNA, 19 nt, Artificial Sequence
  Synthetic oligonucleotide
augauugagaacuguuuaa

SEQ ID NO: 1571 - RNA, 19 nt, Artificial Sequence
  Synthetic oligonucleotide
uuaaacaguucucaaucau

SEQ ID NO: 1572 - RNA, 19 nt, Artificial Sequence
  Synthetic oligonucleotide
auugagaacuguuuagaua

SEQ ID NO: 1573 - RNA, 19 nt, Artificial Sequence
  Synthetic oligonucleotide
uaucuaaacaguucucaau

SEQ ID NO: 1574 - RNA, 19 nt, Artificial Sequence
  Synthetic oligonucleotide
agaacuguuuagaugcaaa

SEQ ID NO: 1575 - RNA, 19 nt, Artificial Sequence
  Synthetic oligonucleotide
uuugcaucuaaacaguucu

SEQ ID NO: 1576 - RNA, 19 nt, Artificial Sequence
  Synthetic oligonucleotide
gaacuguuuagaugcaaaa

SEQ ID NO: 1577 - RNA, 19 nt, Artificial Sequence
  Synthetic oligonucleotide
uuuugcaucuaaacaguuc

SEQ ID NO: 1578 - RNA, 19 nt, Artificial Sequence
  Synthetic oligonucleotide
acuguuuagaugcaaaaua

SEQ ID NO: 1579 - RNA, 19 nt, Artificial Sequence
  Synthetic oligonucleotide
uauuuugcaucuaaacagu

SEQ ID NO: 1580 - RNA, 19 nt, Artificial Sequence
  Synthetic oligonucleotide
uguuuagaugcaaaaucca

SEQ ID NO: 1581 - RNA, 19 nt, Artificial Sequence
  Synthetic oligonucleotide
uggauuuugcaucuaaaca

SEQ ID NO: 1582 - RNA, 19 nt, Artificial Sequence
  Synthetic oligonucleotide
guuuagaugcaaaauccaa

SEQ ID NO: 1583 - RNA, 19 nt, Artificial Sequence
  Synthetic oligonucleotide
uuggauuuugcaucuaaac

SEQ ID NO: 1584 - RNA, 19 nt, Artificial Sequence
  Synthetic oligonucleotide
uuuagaugcaaaauccaca

SEQ ID NO: 1585 - RNA, 19 nt, Artificial Sequence
  Synthetic oligonucleotide
uguggauuuugcaucuaaa

SEQ ID NO: 1586 - RNA, 19 nt, Artificial Sequence
  Synthetic oligonucleotide
uuagaugcaaaauccacaa

SEQ ID NO: 1587 - RNA, 19 nt, Artificial Sequence
  Synthetic oligonucleotide
uuguggauuuugcaucuaa

SEQ ID NO: 1588 - RNA, 19 nt, Artificial Sequence
  Synthetic oligonucleotide
agaugcaaaauccacaaga

SEQ ID NO: 1589 - RNA, 19 nt, Artificial Sequence
  Synthetic oligonucleotide
ucuuguggauuuugcaucu

SEQ ID NO: 1590 - RNA, 19 nt, Artificial Sequence
  Synthetic oligonucleotide
gcaaaauccacaaguauua

SEQ ID NO: 1591 - RNA, 19 nt, Artificial Sequence
  Synthetic oligonucleotide
uaauacuuguggauuuugc

SEQ ID NO: 1592 - RNA, 19 nt, Artificial Sequence
  Synthetic oligonucleotide
aaaauccacaaguauucaa

SEQ ID NO: 1593 - RNA, 19 nt, Artificial Sequence
  Synthetic oligonucleotide
uugaauacuuguggauuuu

SEQ ID NO: 1594 - RNA, 19 nt, Artificial Sequence
  Synthetic oligonucleotide
aauccacaaguauucaaga

SEQ ID NO: 1595 - RNA, 19 nt, Artificial Sequence
  Synthetic oligonucleotide
ucuugaauacuuguggauu

SEQ ID NO: 1596 - RNA, 19 nt, Artificial Sequence
  Synthetic oligonucleotide
uccacaaguauucaaguga

SEQ ID NO: 1597 - RNA, 19 nt, Artificial Sequence
  Synthetic oligonucleotide
ucacuugaauacuugugga

SEQ ID NO: 1598 - RNA, 19 nt, Artificial Sequence
  Synthetic oligonucleotide
ccacaaguauucaagugaa

SEQ ID NO: 1599 - RNA, 19 nt, Artificial Sequence
  Synthetic oligonucleotide
uucacuugaauacuugugg

SEQ ID NO: 1600 - RNA, 19 nt, Artificial Sequence
  Synthetic oligonucleotide
cacaaguauucaagugaua

SEQ ID NO: 1601 - RNA, 19 nt, Artificial Sequence
  Synthetic oligonucleotide
uaucacuugaauacuugug

SEQ ID NO: 1602 - RNA, 19 nt, Artificial Sequence
  Synthetic oligonucleotide
acaaguauucaagugauua

SEQ ID NO: 1603 - RNA, 19 nt, Artificial Sequence
  Synthetic oligonucleotide
uaaucacuugaauacuugu

SEQ ID NO: 1604 - RNA, 19 nt, Artificial Sequence
  Synthetic oligonucleotide
aaguauucaagugauugua

SEQ ID NO: 1605 - RNA, 19 nt, Artificial Sequence
  Synthetic oligonucleotide
uacaaucacuugaauacuu

SEQ ID NO: 1606 - RNA, 19 nt, Artificial Sequence
  Synthetic oligonucleotide
aguauucaagugauuguua

SEQ ID NO: 1607 - RNA, 19 nt, Artificial Sequence
  Synthetic oligonucleotide
uaacaaucacuugaauacu

SEQ ID NO: 1608 - RNA, 19 nt, Artificial Sequence
  Synthetic oligonucleotide
guauucaagugauuguuaa

SEQ ID NO: 1609 - RNA, 19 nt, Artificial Sequence
  Synthetic oligonucleotide
uuaacaaucacuugaauac

SEQ ID NO: 1610 - RNA, 19 nt, Artificial Sequence
  Synthetic oligonucleotide
ucaagugauuguuaaagaa

SEQ ID NO: 1611 - RNA, 19 nt, Artificial Sequence
  Synthetic oligonucleotide
uucuuuaacaaucacuuga

SEQ ID NO: 1612 - RNA, 19 nt, Artificial Sequence
  Synthetic oligonucleotide
caagugauuguuaaagaga

SEQ ID NO: 1613 - RNA, 19 nt, Artificial Sequence
  Synthetic oligonucleotide
ucucuuuaacaaucacuug

SEQ ID NO: 1614 - RNA, 19 nt, Artificial Sequence
  Synthetic oligonucleotide
agugauuguuaaagaggga

SEQ ID NO: 1615 - RNA, 19 nt, Artificial Sequence
  Synthetic oligonucleotide
ucccucuuuaacaaucacu

SEQ ID NO: 1616 - RNA, 19 nt, Artificial Sequence
  Synthetic oligonucleotide
gagggaggccugaaguuga

SEQ ID NO: 1617 - RNA, 19 nt, Artificial Sequence
  Synthetic oligonucleotide
ucaacuucaggccucccuc

SEQ ID NO: 1618 - RNA, 19 nt, Artificial Sequence
  Synthetic oligonucleotide
agggaggccugaaguugaa

SEQ ID NO: 1619 - RNA, 19 nt, Artificial Sequence
  Synthetic oligonucleotide
uucaacuucaggccucccu

SEQ ID NO: 1620 - RNA, 19 nt, Artificial Sequence
  Synthetic oligonucleotide
gggaggccugaaguugaua

SEQ ID NO: 1621 - RNA, 19 nt, Artificial Sequence
  Synthetic oligonucleotide
uaucaacuucaggccuccc

SEQ ID NO: 1622 - RNA, 19 nt, Artificial Sequence
  Synthetic oligonucleotide
gaggccugaaguugauuca

SEQ ID NO: 1623 - RNA, 19 nt, Artificial Sequence
  Synthetic oligonucleotide
ugaaucaacuucaggccuc

SEQ ID NO: 1624 - RNA, 19 nt, Artificial Sequence
  Synthetic oligonucleotide
cugaaguugauucagauca

SEQ ID NO: 1625 - RNA, 19 nt, Artificial Sequence
  Synthetic oligonucleotide
ugaucugaaucaacuucag

SEQ ID NO: 1626 - RNA, 19 nt, Artificial Sequence
  Synthetic oligonucleotide
gaaguugauucagauccaa

SEQ ID NO: 1627 - RNA, 19 nt, Artificial Sequence
  Synthetic oligonucleotide
uuggaucugaaucaacuuc

SEQ ID NO: 1628 - RNA, 19 nt, Artificial Sequence
  Synthetic oligonucleotide
aaguugauucagauccaaa

SEQ ID NO: 1629 - RNA, 19 nt, Artificial Sequence
  Synthetic oligonucleotide
uuuggaucugaaucaacuu

SEQ ID NO: 1630 - RNA, 19 nt, Artificial Sequence
  Synthetic oligonucleotide
aguugauucagauccaaga

SEQ ID NO: 1631 - RNA, 19 nt, Artificial Sequence
  Synthetic oligonucleotide
ucuuggaucugaaucaacu

SEQ ID NO: 1632 - RNA, 19 nt, Artificial Sequence
  Synthetic oligonucleotide
guugauucagauccaagaa

SEQ ID NO: 1633 - RNA, 19 nt, Artificial Sequence
  Synthetic oligonucleotide
uucuuggaucugaaucaac

SEQ ID NO: 1634 - RNA, 19 nt, Artificial Sequence
  Synthetic oligonucleotide
ugauucagauccaagacaa

SEQ ID NO: 1635 - RNA, 19 nt, Artificial Sequence
  Synthetic oligonucleotide
uugucuuggaucugaauca

SEQ ID NO: 1636 - RNA, 19 nt, Artificial Sequence
  Synthetic oligonucleotide
auucagauccaagacaaua

SEQ ID NO: 1637 - RNA, 19 nt, Artificial Sequence
  Synthetic oligonucleotide
uauugucuuggaucugaau

SEQ ID NO: 1638 - RNA, 19 nt, Artificial Sequence
  Synthetic oligonucleotide
gcaccgggaucaggaaaga

SEQ ID NO: 1639 - RNA, 19 nt, Artificial Sequence
  Synthetic oligonucleotide
ucuuuccugaucccggugc

SEQ ID NO: 1640 - RNA, 19 nt, Artificial Sequence
  Synthetic oligonucleotide
caccgggaucaggaaagaa

SEQ ID NO: 1641 - RNA, 19 nt, Artificial Sequence
  Synthetic oligonucleotide
uucuuuccugaucccggug

SEQ ID NO: 1642 - RNA, 19 nt, Artificial Sequence
  Synthetic oligonucleotide
gaucaggaaagaagaucua

SEQ ID NO: 1643 - RNA, 19 nt, Artificial Sequence
  Synthetic oligonucleotide
uagaucuucuuuccugauc

SEQ ID NO: 1644 - RNA, 19 nt, Artificial Sequence
  Synthetic oligonucleotide
gaaagaagaucuggauaua

SEQ ID NO: 1645 - RNA, 19 nt, Artificial Sequence
  Synthetic oligonucleotide
uauauccagaucuucuuuc

SEQ ID NO: 1646 - RNA, 19 nt, Artificial Sequence
  Synthetic oligonucleotide
aaagaagaucuggauauua

SEQ ID NO: 1647 - RNA, 19 nt, Artificial Sequence
  Synthetic oligonucleotide
uaauauccagaucuucuuu

SEQ ID NO: 1648 - RNA, 19 nt, Artificial Sequence
  Synthetic oligonucleotide
aagaagaucuggauauuga

SEQ ID NO: 1649 - RNA, 19 nt, Artificial Sequence
  Synthetic oligonucleotide
ucaauauccagaucuucuu

SEQ ID NO: 1650 - RNA, 19 nt, Artificial Sequence
  Synthetic oligonucleotide
agaucuggauauuguauga

SEQ ID NO: 1651 - RNA, 19 nt, Artificial Sequence
  Synthetic oligonucleotide
ucauacaauauccagaucu

SEQ ID NO: 1652 - RNA, 19 nt, Artificial Sequence
  Synthetic oligonucleotide
gaucuggauauuguaugua

SEQ ID NO: 1653 - RNA, 19 nt, Artificial Sequence
  Synthetic oligonucleotide
uacauacaauauccagauc

SEQ ID NO: 1654 - RNA, 19 nt, Artificial Sequence
  Synthetic oligonucleotide
aucuggauauuguauguga

SEQ ID NO: 1655 - RNA, 19 nt, Artificial Sequence
  Synthetic oligonucleotide
ucacauacaauauccagau

SEQ ID NO: 1656 - RNA, 19 nt, Artificial Sequence
  Synthetic oligonucleotide
ucuggauauuguaugugaa

SEQ ID NO: 1657 - RNA, 19 nt, Artificial Sequence
  Synthetic oligonucleotide
uucacauacaauauccaga

SEQ ID NO: 1658 - RNA, 19 nt, Artificial Sequence
  Synthetic oligonucleotide
ggauauuguaugugaaaga

SEQ ID NO: 1659 - RNA, 19 nt, Artificial Sequence
  Synthetic oligonucleotide
ucuuucacauacaauaucc

SEQ ID NO: 1660 - RNA, 19 nt, Artificial Sequence
  Synthetic oligonucleotide
uauuguaugugaaagguua

SEQ ID NO: 1661 - RNA, 19 nt, Artificial Sequence
  Synthetic oligonucleotide
uaaccuuucacauacaaua

SEQ ID NO: 1662 - RNA, 19 nt, Artificial Sequence
  Synthetic oligonucleotide
auuguaugugaaagguuca

SEQ ID NO: 1663 - RNA, 19 nt, Artificial Sequence
  Synthetic oligonucleotide
ugaaccuuucacauacaau

SEQ ID NO: 1664 - RNA, 19 nt, Artificial Sequence
  Synthetic oligonucleotide
uuguaugugaaagguucaa

SEQ ID NO: 1665 - RNA, 19 nt, Artificial Sequence
  Synthetic oligonucleotide
uugaaccuuucacauacaa

SEQ ID NO: 1666 - RNA, 19 nt, Artificial Sequence
  Synthetic oligonucleotide
uguaugugaaagguucaca

SEQ ID NO: 1667 - RNA, 19 nt, Artificial Sequence
  Synthetic oligonucleotide
ugugaaccuuucacauaca

SEQ ID NO: 1668 - RNA, 19 nt, Artificial Sequence
  Synthetic oligonucleotide
guaugugaaagguucacua

SEQ ID NO: 1669 - RNA, 19 nt, Artificial Sequence
  Synthetic oligonucleotide
uagugaaccuuucacauac

SEQ ID NO: 1670 - RNA, 19 nt, Artificial Sequence
  Synthetic oligonucleotide
augugaaagguucacuaca

SEQ ID NO: 1671 - RNA, 19 nt, Artificial Sequence
  Synthetic oligonucleotide
uguagugaaccuuucacau

SEQ ID NO: 1672 - RNA, 19 nt, Artificial Sequence
  Synthetic oligonucleotide
ugugaaagguucacuacua

SEQ ID NO: 1673 - RNA, 19 nt, Artificial Sequence
  Synthetic oligonucleotide
uaguagugaaccuuucaca

SEQ ID NO: 1674 - RNA, 19 nt, Artificial Sequence
  Synthetic oligonucleotide
gugaaagguucacuacuaa

SEQ ID NO: 1675 - RNA, 19 nt, Artificial Sequence
  Synthetic oligonucleotide
uuaguagugaaccuuucac

SEQ ID NO: 1676 - RNA, 19 nt, Artificial Sequence
  Synthetic oligonucleotide
ugaaagguucacuacuaga

SEQ ID NO: 1677 - RNA, 19 nt, Artificial Sequence
  Synthetic oligonucleotide
ucuaguagugaaccuuuca

SEQ ID NO: 1678 - RNA, 19 nt, Artificial Sequence
  Synthetic oligonucleotide
gaaagguucacuacuagua

SEQ ID NO: 1679 - RNA, 19 nt, Artificial Sequence
  Synthetic oligonucleotide
uacuaguagugaaccuuuc

SEQ ID NO: 1680 - RNA, 19 nt, Artificial Sequence
  Synthetic oligonucleotide
aagguucacuacuaguaaa

SEQ ID NO: 1681 - RNA, 19 nt, Artificial Sequence
  Synthetic oligonucleotide
uuuacuaguagugaaccuu

SEQ ID NO: 1682 - RNA, 19 nt, Artificial Sequence
  Synthetic oligonucleotide
agguucacuacuaguaaaa

SEQ ID NO: 1683 - RNA, 19 nt, Artificial Sequence
  Synthetic oligonucleotide
uuuuacuaguagugaaccu

SEQ ID NO: 1684 - RNA, 19 nt, Artificial Sequence
  Synthetic oligonucleotide
guucacuacuaguaaacua

SEQ ID NO: 1685 - RNA, 19 nt, Artificial Sequence
  Synthetic oligonucleotide
uaguuuacuaguagugaac

SEQ ID NO: 1686 - RNA, 19 nt, Artificial Sequence
  Synthetic oligonucleotide
uucacuacuaguaaacuga

SEQ ID NO: 1687 - RNA, 19 nt, Artificial Sequence
  Synthetic oligonucleotide
ucaguuuacuaguagugaa

SEQ ID NO: 1688 - RNA, 19 nt, Artificial Sequence
  Synthetic oligonucleotide
ucacuacuaguaaacugca

SEQ ID NO: 1689 - RNA, 19 nt, Artificial Sequence
  Synthetic oligonucleotide
ugcaguuuacuaguaguga

SEQ ID NO: 1690 - RNA, 19 nt, Artificial Sequence
  Synthetic oligonucleotide
cuacuaguaaacugcagua

SEQ ID NO: 1691 - RNA, 19 nt, Artificial Sequence
  Synthetic oligonucleotide
uacugcaguuuacuaguag

SEQ ID NO: 1692 - RNA, 19 nt, Artificial Sequence
  Synthetic oligonucleotide
uaguaaacugcaguccuua

SEQ ID NO: 1693 - RNA, 19 nt, Artificial Sequence
  Synthetic oligonucleotide
uaaggacugcaguuuacua

SEQ ID NO: 1694 - RNA, 19 nt, Artificial Sequence
  Synthetic oligonucleotide
aguaaacugcaguccuuua

SEQ ID NO: 1695 - RNA, 19 nt, Artificial Sequence
  Synthetic oligonucleotide
uaaaggacugcaguuuacu

SEQ ID NO: 1696 - RNA, 19 nt, Artificial Sequence
  Synthetic oligonucleotide
guaaacugcaguccuuuga

SEQ ID NO: 1697 - RNA, 19 nt, Artificial Sequence
  Synthetic oligonucleotide
ucaaaggacugcaguuuac

SEQ ID NO: 1698 - RNA, 19 nt, Artificial Sequence
  Synthetic oligonucleotide
uaaacugcaguccuuugaa

SEQ ID NO: 1699 - RNA, 19 nt, Artificial Sequence
  Synthetic oligonucleotide
uucaaaggacugcaguuua

SEQ ID NO: 1700 - RNA, 19 nt, Artificial Sequence
  Synthetic oligonucleotide
aaacugcaguccuuugaga

SEQ ID NO: 1701 - RNA, 19 nt, Artificial Sequence
  Synthetic oligonucleotide
ucucaaaggacugcaguuu

SEQ ID NO: 1702 - RNA, 19 nt, Artificial Sequence
  Synthetic oligonucleotide
ugcaguccuuugaggauua

SEQ ID NO: 1703 - RNA, 19 nt, Artificial Sequence
  Synthetic oligonucleotide
uaauccucaaaggacugca

SEQ ID NO: 1704 - RNA, 19 nt, Artificial Sequence
  Synthetic oligonucleotide
gcaguccuuugaggauuua

SEQ ID NO: 1705 - RNA, 19 nt, Artificial Sequence
  Synthetic oligonucleotide
uaaauccucaaaggacugc

SEQ ID NO: 1706 - RNA, 19 nt, Artificial Sequence
  Synthetic oligonucleotide
caguccuuugaggauuuaa

SEQ ID NO: 1707 - RNA, 19 nt, Artificial Sequence
  Synthetic oligonucleotide
uuaaauccucaaaggacug

SEQ ID NO: 1708 - RNA, 19 nt, Artificial Sequence
  Synthetic oligonucleotide
aguccuuugaggauuuaga

SEQ ID NO: 1709 - RNA, 19 nt, Artificial Sequence
  Synthetic oligonucleotide
ucuaaauccucaaaggacu

SEQ ID NO: 1710 - RNA, 19 nt, Artificial Sequence
  Synthetic oligonucleotide
guccuuugaggauuuagca

SEQ ID NO: 1711 - RNA, 19 nt, Artificial Sequence
  Synthetic oligonucleotide
ugcuaaauccucaaaggac

SEQ ID NO: 1712 - RNA, 19 nt, Artificial Sequence
  Synthetic oligonucleotide
uccuuugaggauuuagcca

SEQ ID NO: 1713 - RNA, 19 nt, Artificial Sequence
  Synthetic oligonucleotide
uggcuaaauccucaaagga

SEQ ID NO: 1714 - RNA, 19 nt, Artificial Sequence
  Synthetic oligonucleotide
cuuugaggauuuagccaga

SEQ ID NO: 1715 - RNA, 19 nt, Artificial Sequence
  Synthetic oligonucleotide
ucuggcuaaauccucaaag

SEQ ID NO: 1716 - RNA, 19 nt, Artificial Sequence
  Synthetic oligonucleotide
uuugaggauuuagccagua

SEQ ID NO: 1717 - RNA, 19 nt, Artificial Sequence
  Synthetic oligonucleotide
uacuggcuaaauccucaaa

SEQ ID NO: 1718 - RNA, 19 nt, Artificial Sequence
  Synthetic oligonucleotide
uugaggauuuagccaguaa

SEQ ID NO: 1719 - RNA, 19 nt, Artificial Sequence
  Synthetic oligonucleotide
uuacuggcuaaauccucaa

SEQ ID NO: 1720 - RNA, 19 nt, Artificial Sequence
  Synthetic oligonucleotide
ugaggauuuagccaguaua

SEQ ID NO: 1721 - RNA, 19 nt, Artificial Sequence
  Synthetic oligonucleotide
uauacuggcuaaauccuca

SEQ ID NO: 1722 - RNA, 19 nt, Artificial Sequence
  Synthetic oligonucleotide
gaggauuuagccaguauua

SEQ ID NO: 1723 - RNA, 19 nt, Artificial Sequence
  Synthetic oligonucleotide
uaauacuggcuaaauccuc

SEQ ID NO: 1724 - RNA, 19 nt, Artificial Sequence
  Synthetic oligonucleotide
aggauuuagccaguauuua

SEQ ID NO: 1725 - RNA, 19 nt, Artificial Sequence
  Synthetic oligonucleotide
uaaauacuggcuaaauccu

SEQ ID NO: 1726 - RNA, 19 nt, Artificial Sequence
  Synthetic oligonucleotide
ggauuuagccaguauuuca

SEQ ID NO: 1727 - RNA, 19 nt, Artificial Sequence
  Synthetic oligonucleotide
ugaaauacuggcuaaaucc

SEQ ID NO: 1728 - RNA, 19 nt, Artificial Sequence
  Synthetic oligonucleotide
gauuuagccaguauuucua

SEQ ID NO: 1729 - RNA, 19 nt, Artificial Sequence
  Synthetic oligonucleotide
uagaaauacuggcuaaauc

SEQ ID NO: 1730 - RNA, 19 nt, Artificial Sequence
  Synthetic oligonucleotide
uuagccaguauuucuacca

SEQ ID NO: 1731 - RNA, 19 nt, Artificial Sequence
  Synthetic oligonucleotide
ugguagaaauacuggcuaa

SEQ ID NO: 1732 - RNA, 19 nt, Artificial Sequence
  Synthetic oligonucleotide
uagccaguauuucuaccua

SEQ ID NO: 1733 - RNA, 19 nt, Artificial Sequence
  Synthetic oligonucleotide
uagguagaaauacuggcua

SEQ ID NO: 1734 - RNA, 19 nt, Artificial Sequence
  Synthetic oligonucleotide
agccaguauuucuaccuaa

SEQ ID NO: 1735 - RNA, 19 nt, Artificial Sequence
  Synthetic oligonucleotide
uuagguagaaauacuggcu

SEQ ID NO: 1736 - RNA, 19 nt, Artificial Sequence
  Synthetic oligonucleotide
gccaguauuucuaccuaua

SEQ ID NO: 1737 - RNA, 19 nt, Artificial Sequence
  Synthetic oligonucleotide
uauagguagaaauacuggc

SEQ ID NO: 1738 - RNA, 19 nt, Artificial Sequence
  Synthetic oligonucleotide
caguauuucuaccuaugga

SEQ ID NO: 1739 - RNA, 19 nt, Artificial Sequence
  Synthetic oligonucleotide
uccauagguagaaauacug

SEQ ID NO: 1740 - RNA, 19 nt, Artificial Sequence
  Synthetic oligonucleotide
guauuucuaccuauggcua

SEQ ID NO: 1741 - RNA, 19 nt, Artificial Sequence
  Synthetic oligonucleotide
uagccauagguagaaauac

SEQ ID NO: 1742 - RNA, 19 nt, Artificial Sequence
  Synthetic oligonucleotide
uauuucuaccuauggcuua

SEQ ID NO: 1743 - RNA, 19 nt, Artificial Sequence
  Synthetic oligonucleotide
uaagccauagguagaaaua

SEQ ID NO: 1744 - RNA, 19 nt, Artificial Sequence
  Synthetic oligonucleotide
auuucuaccuauggcuuua

SEQ ID NO: 1745 - RNA, 19 nt, Artificial Sequence
  Synthetic oligonucleotide
uaaagccauagguagaaau

SEQ ID NO: 1746 - RNA, 19 nt, Artificial Sequence
  Synthetic oligonucleotide
uuucuaccuauggcuuuca

SEQ ID NO: 1747 - RNA, 19 nt, Artificial Sequence
  Synthetic oligonucleotide
ugaaagccauagguagaaa

SEQ ID NO: 1748 - RNA, 19 nt, Artificial Sequence
  Synthetic oligonucleotide
ucuaccuauggcuuucgaa

SEQ ID NO: 1749 - RNA, 19 nt, Artificial Sequence
  Synthetic oligonucleotide
uucgaaagccauagguaga

SEQ ID NO: 1750 - RNA, 19 nt, Artificial Sequence
  Synthetic oligonucleotide
cuaccuauggcuuucgaga

SEQ ID NO: 1751 - RNA, 19 nt, Artificial Sequence
  Synthetic oligonucleotide
ucucgaaagccauagguag

SEQ ID NO: 1752 - RNA, 19 nt, Artificial Sequence
  Synthetic oligonucleotide
uaccuauggcuuucgagga

SEQ ID NO: 1753 - RNA, 19 nt, Artificial Sequence
  Synthetic oligonucleotide
uccucgaaagccauaggua

SEQ ID NO: 1754 - RNA, 19 nt, Artificial Sequence
  Synthetic oligonucleotide
accuauggcuuucgaggua

SEQ ID NO: 1755 - RNA, 19 nt, Artificial Sequence
  Synthetic oligonucleotide
uaccucgaaagccauaggu

SEQ ID NO: 1756 - RNA, 19 nt, Artificial Sequence
  Synthetic oligonucleotide
gcuuucgaggugaggcuua

SEQ ID NO: 1757 - RNA, 19 nt, Artificial Sequence
  Synthetic oligonucleotide
uaagccucaccucgaaagc

SEQ ID NO: 1758 - RNA, 19 nt, Artificial Sequence
  Synthetic oligonucleotide
uuucgaggugaggcuuuga

SEQ ID NO: 1759 - RNA, 19 nt, Artificial Sequence
  Synthetic oligonucleotide
ucaaagccucaccucgaaa

SEQ ID NO: 1760 - RNA, 19 nt, Artificial Sequence
  Synthetic oligonucleotide
gaggugaggcuuuggccaa

SEQ ID NO: 1761 - RNA, 19 nt, Artificial Sequence
  Synthetic oligonucleotide
uuggccaaagccucaccuc

SEQ ID NO: 1762 - RNA, 19 nt, Artificial Sequence
  Synthetic oligonucleotide
gcuuuggccagcauaagca

SEQ ID NO: 1763 - RNA, 19 nt, Artificial Sequence
  Synthetic oligonucleotide
ugcuuaugcuggccaaagc

SEQ ID NO: 1764 - RNA, 19 nt, Artificial Sequence
  Synthetic oligonucleotide
agcauaagccauguggcua

SEQ ID NO: 1765 - RNA, 19 nt, Artificial Sequence
  Synthetic oligonucleotide
uagccacauggcuuaugcu

SEQ ID NO: 1766 - RNA, 19 nt, Artificial Sequence
  Synthetic oligonucleotide
agccauguggcucauguua

SEQ ID NO: 1767 - RNA, 19 nt, Artificial Sequence
  Synthetic oligonucleotide
uaacaugagccacauggcu

SEQ ID NO: 1768 - RNA, 19 nt, Artificial Sequence
  Synthetic oligonucleotide
cauguggcucauguuacua

SEQ ID NO: 1769 - RNA, 19 nt, Artificial Sequence
  Synthetic oligonucleotide
uaguaacaugagccacaug

SEQ ID NO: 1770 - RNA, 19 nt, Artificial Sequence
  Synthetic oligonucleotide
auguggcucauguuacuaa

SEQ ID NO: 1771 - RNA, 19 nt, Artificial Sequence
  Synthetic oligonucleotide
uuaguaacaugagccacau

SEQ ID NO: 1772 - RNA, 19 nt, Artificial Sequence
  Synthetic oligonucleotide
uguggcucauguuacuaua

SEQ ID NO: 1773 - RNA, 19 nt, Artificial Sequence
  Synthetic oligonucleotide
uauaguaacaugagccaca

SEQ ID NO: 1774 - RNA, 19 nt, Artificial Sequence
  Synthetic oligonucleotide
guggcucauguuacuauua

SEQ ID NO: 1775 - RNA, 19 nt, Artificial Sequence
  Synthetic oligonucleotide
uaauaguaacaugagccac

SEQ ID NO: 1776 - RNA, 19 nt, Artificial Sequence
  Synthetic oligonucleotide
uggcucauguuacuauuaa

SEQ ID NO: 1777 - RNA, 19 nt, Artificial Sequence
  Synthetic oligonucleotide
uuaauaguaacaugagcca

SEQ ID NO: 1778 - RNA, 19 nt, Artificial Sequence
  Synthetic oligonucleotide
ggcucauguuacuauuaca

SEQ ID NO: 1779 - RNA, 19 nt, Artificial Sequence
  Synthetic oligonucleotide
uguaauaguaacaugagcc

SEQ ID NO: 1780 - RNA, 19 nt, Artificial Sequence
  Synthetic oligonucleotide
cucauguuacuauuacaaa

SEQ ID NO: 1781 - RNA, 19 nt, Artificial Sequence
  Synthetic oligonucleotide
uuuguaauaguaacaugag

SEQ ID NO: 1782 - RNA, 19 nt, Artificial Sequence
  Synthetic oligonucleotide
ucauguuacuauuacaaca

SEQ ID NO: 1783 - RNA, 19 nt, Artificial Sequence
  Synthetic oligonucleotide
uguuguaauaguaacauga

SEQ ID NO: 1784 - RNA, 19 nt, Artificial Sequence
  Synthetic oligonucleotide
cauguuacuauuacaacga

SEQ ID NO: 1785 - RNA, 19 nt, Artificial Sequence
  Synthetic oligonucleotide
ucguuguaauaguaacaug

SEQ ID NO: 1786 - RNA, 19 nt, Artificial Sequence
  Synthetic oligonucleotide
auguuacuauuacaacgaa

SEQ ID NO: 1787 - RNA, 19 nt, Artificial Sequence
  Synthetic oligonucleotide
uucguuguaauaguaacau

SEQ ID NO: 1788 - RNA, 19 nt, Artificial Sequence
  Synthetic oligonucleotide
uguuacuauuacaacgaaa

SEQ ID NO: 1789 - RNA, 19 nt, Artificial Sequence
  Synthetic oligonucleotide
uuucguuguaauaguaaca

SEQ ID NO: 1790 - RNA, 19 nt, Artificial Sequence
  Synthetic oligonucleotide
uacuauuacaacgaaaaca

SEQ ID NO: 1791 - RNA, 19 nt, Artificial Sequence
  Synthetic oligonucleotide
uguuuucguuguaauagua

SEQ ID NO: 1792 - RNA, 19 nt, Artificial Sequence
  Synthetic oligonucleotide
acuauuacaacgaaaacaa

SEQ ID NO: 1793 - RNA, 19 nt, Artificial Sequence
  Synthetic oligonucleotide
uuguuuucguuguaauagu

SEQ ID NO: 1794 - RNA, 19 nt, Artificial Sequence
  Synthetic oligonucleotide
auuacaacgaaaacagcua

SEQ ID NO: 1795 - RNA, 19 nt, Artificial Sequence
  Synthetic oligonucleotide
uagcuguuuucguuguaau

SEQ ID NO: 1796 - RNA, 19 nt, Artificial Sequence
  Synthetic oligonucleotide
uacaacgaaaacagcugaa

SEQ ID NO: 1797 - RNA, 19 nt, Artificial Sequence
  Synthetic oligonucleotide
uucagcuguuuucguugua

SEQ ID NO: 1798 - RNA, 19 nt, Artificial Sequence
  Synthetic oligonucleotide
acaacgaaaacagcugaua

SEQ ID NO: 1799 - RNA, 19 nt, Artificial Sequence
  Synthetic oligonucleotide
uaucagcuguuuucguugu

SEQ ID NO: 1800 - RNA, 19 nt, Artificial Sequence
  Synthetic oligonucleotide
caacgaaaacagcugauga

SEQ ID NO: 1801 - RNA, 19 nt, Artificial Sequence
  Synthetic oligonucleotide
ucaucagcuguuuucguug

SEQ ID NO: 1802 - RNA, 19 nt, Artificial Sequence
  Synthetic oligonucleotide
acgaaaacagcugauggaa

SEQ ID NO: 1803 - RNA, 19 nt, Artificial Sequence
  Synthetic oligonucleotide
uuccaucagcuguuuucgu

SEQ ID NO: 1804 - RNA, 19 nt, Artificial Sequence
  Synthetic oligonucleotide
cgaaaacagcugauggaaa

SEQ ID NO: 1805 - RNA, 19 nt, Artificial Sequence
  Synthetic oligonucleotide
uuuccaucagcuguuuucg

SEQ ID NO: 1806 - RNA, 19 nt, Artificial Sequence
  Synthetic oligonucleotide
aaacagcugauggaaagua

SEQ ID NO: 1807 - RNA, 19 nt, Artificial Sequence
  Synthetic oligonucleotide
uacuuuccaucagcuguuu

SEQ ID NO: 1808 - RNA, 19 nt, Artificial Sequence
  Synthetic oligonucleotide
acagcugauggaaagugua

SEQ ID NO: 1809 - RNA, 19 nt, Artificial Sequence
  Synthetic oligonucleotide
uacacuuuccaucagcugu

SEQ ID NO: 1810 - RNA, 19 nt, Artificial Sequence
  Synthetic oligonucleotide
cagcugauggaaaguguga

SEQ ID NO: 1811 - RNA, 19 nt, Artificial Sequence
  Synthetic oligonucleotide
ucacacuuuccaucagcug

SEQ ID NO: 1812 - RNA, 19 nt, Artificial Sequence
  Synthetic oligonucleotide
agcugauggaaagugugca

SEQ ID NO: 1813 - RNA, 19 nt, Artificial Sequence
  Synthetic oligonucleotide
ugcacacuuuccaucagcu

SEQ ID NO: 1814 - RNA, 19 nt, Artificial Sequence
  Synthetic oligonucleotide
cugauggaaagugugcaua

SEQ ID NO: 1815 - RNA, 19 nt, Artificial Sequence
  Synthetic oligonucleotide
uaugcacacuuuccaucag

SEQ ID NO: 1816 - RNA, 19 nt, Artificial Sequence
  Synthetic oligonucleotide
ugauggaaagugugcauaa

SEQ ID NO: 1817 - RNA, 19 nt, Artificial Sequence
  Synthetic oligonucleotide
uuaugcacacuuuccauca

SEQ ID NO: 1818 - RNA, 19 nt, Artificial Sequence
  Synthetic oligonucleotide
auggaaagugugcauacaa

SEQ ID NO: 1819 - RNA, 19 nt, Artificial Sequence
  Synthetic oligonucleotide
uuguaugcacacuuuccau

SEQ ID NO: 1820 - RNA, 19 nt, Artificial Sequence
  Synthetic oligonucleotide
uggaaagugugcauacaga

SEQ ID NO: 1821 - RNA, 19 nt, Artificial Sequence
  Synthetic oligonucleotide
ucuguaugcacacuuucca

SEQ ID NO: 1822 - RNA, 19 nt, Artificial Sequence
  Synthetic oligonucleotide
ggaaagugugcauacagaa

SEQ ID NO: 1823 - RNA, 19 nt, Artificial Sequence
  Synthetic oligonucleotide
uucuguaugcacacuuucc

SEQ ID NO: 1824 - RNA, 19 nt, Artificial Sequence
  Synthetic oligonucleotide
gaaagugugcauacagaga

SEQ ID NO: 1825 - RNA, 19 nt, Artificial Sequence
  Synthetic oligonucleotide
ucucuguaugcacacuuuc

SEQ ID NO: 1826 - RNA, 19 nt, Artificial Sequence
  Synthetic oligonucleotide
aaagugugcauacagagca

SEQ ID NO: 1827 - RNA, 19 nt, Artificial Sequence
  Synthetic oligonucleotide
ugcucuguaugcacacuuu

SEQ ID NO: 1828 - RNA, 19 nt, Artificial Sequence
  Synthetic oligonucleotide
aagugugcauacagagcaa

SEQ ID NO: 1829 - RNA, 19 nt, Artificial Sequence
  Synthetic oligonucleotide
uugcucuguaugcacacuu

SEQ ID NO: 1830 - RNA, 19 nt, Artificial Sequence
  Synthetic oligonucleotide
gugugcauacagagcaaga

SEQ ID NO: 1831 - RNA, 19 nt, Artificial Sequence
  Synthetic oligonucleotide
ucuugcucuguaugcacac

SEQ ID NO: 1832 - RNA, 19 nt, Artificial Sequence
  Synthetic oligonucleotide
gcauacagagcaaguuaca

SEQ ID NO: 1833 - RNA, 19 nt, Artificial Sequence
  Synthetic oligonucleotide
uguaacuugcucuguaugc

SEQ ID NO: 1834 - RNA, 19 nt, Artificial Sequence
  Synthetic oligonucleotide
cauacagagcaaguuacua

SEQ ID NO: 1835 - RNA, 19 nt, Artificial Sequence
  Synthetic oligonucleotide
uaguaacuugcucuguaug

SEQ ID NO: 1836 - RNA, 19 nt, Artificial Sequence
  Synthetic oligonucleotide
auacagagcaaguuacuca

SEQ ID NO: 1837 - RNA, 19 nt, Artificial Sequence
  Synthetic oligonucleotide
ugaguaacuugcucuguau

SEQ ID NO: 1838 - RNA, 19 nt, Artificial Sequence
  Synthetic oligonucleotide
uacagagcaaguuacucaa

SEQ ID NO: 1839 - RNA, 19 nt, Artificial Sequence
  Synthetic oligonucleotide
uugaguaacuugcucugua

SEQ ID NO: 1840 - RNA, 19 nt, Artificial Sequence
  Synthetic oligonucleotide
cagagcaaguuacucagaa

SEQ ID NO: 1841 - RNA, 19 nt, Artificial Sequence
  Synthetic oligonucleotide
uucugaguaacuugcucug

SEQ ID NO: 1842 - RNA, 19 nt, Artificial Sequence
  Synthetic oligonucleotide
gagcaaguuacucagauga

SEQ ID NO: 1843 - RNA, 19 nt, Artificial Sequence
  Synthetic oligonucleotide
ucaucugaguaacuugcuc

SEQ ID NO: 1844 - RNA, 19 nt, Artificial Sequence
  Synthetic oligonucleotide
caaguuacucagauggaaa

SEQ ID NO: 1845 - RNA, 19 nt, Artificial Sequence
  Synthetic oligonucleotide
uuuccaucugaguaacuug

SEQ ID NO: 1846 - RNA, 19 nt, Artificial Sequence
  Synthetic oligonucleotide
aaguuacucagauggaaaa

SEQ ID NO: 1847 - RNA, 19 nt, Artificial Sequence
  Synthetic oligonucleotide
uuuuccaucugaguaacuu

SEQ ID NO: 1848 - RNA, 19 nt, Artificial Sequence
  Synthetic oligonucleotide
acugaaagccccuccuaaa

SEQ ID NO: 1849 - RNA, 19 nt, Artificial Sequence
  Synthetic oligonucleotide
uuuaggaggggcuuucagu

SEQ ID NO: 1850 - RNA, 19 nt, Artificial Sequence
  Synthetic oligonucleotide
cugaaagccccuccuaaaa

SEQ ID NO: 1851 - RNA, 19 nt, Artificial Sequence
  Synthetic oligonucleotide
uuuuaggaggggcuuucag

SEQ ID NO: 1852 - RNA, 19 nt, Artificial Sequence
  Synthetic oligonucleotide
gaaagccccuccuaaacca

SEQ ID NO: 1853 - RNA, 19 nt, Artificial Sequence
  Synthetic oligonucleotide
ugguuuaggaggggcuuuc

SEQ ID NO: 1854 - RNA, 19 nt, Artificial Sequence
  Synthetic oligonucleotide
aaagccccuccuaaaccaa

SEQ ID NO: 1855 - RNA, 19 nt, Artificial Sequence
  Synthetic oligonucleotide
uugguuuaggaggggcuuu

SEQ ID NO: 1856 - RNA, 19 nt, Artificial Sequence
  Synthetic oligonucleotide
aagccccuccuaaaccaua

SEQ ID NO: 1857 - RNA, 19 nt, Artificial Sequence
  Synthetic oligonucleotide
uaugguuuaggaggggcuu

SEQ ID NO: 1858 - RNA, 19 nt, Artificial Sequence
  Synthetic oligonucleotide
gccccuccuaaaccaugua

SEQ ID NO: 1859 - RNA, 19 nt, Artificial Sequence
  Synthetic oligonucleotide
uacaugguuuaggaggggc

SEQ ID NO: 1860 - RNA, 19 nt, Artificial Sequence
  Synthetic oligonucleotide
ccccuccuaaaccauguga

SEQ ID NO: 1861 - RNA, 19 nt, Artificial Sequence
  Synthetic oligonucleotide
ucacaugguuuaggagggg

SEQ ID NO: 1862 - RNA, 19 nt, Artificial Sequence
  Synthetic oligonucleotide
ccuccuaaaccaugugcua

SEQ ID NO: 1863 - RNA, 19 nt, Artificial Sequence
  Synthetic oligonucleotide
uagcacaugguuuaggagg

SEQ ID NO: 1864 - RNA, 19 nt, Artificial Sequence
  Synthetic oligonucleotide
cuccuaaaccaugugcuga

SEQ ID NO: 1865 - RNA, 19 nt, Artificial Sequence
  Synthetic oligonucleotide
ucagcacaugguuuaggag

SEQ ID NO: 1866 - RNA, 19 nt, Artificial Sequence
  Synthetic oligonucleotide
aaaccaugugcuggcaaua

SEQ ID NO: 1867 - RNA, 19 nt, Artificial Sequence
  Synthetic oligonucleotide
uauugccagcacaugguuu

SEQ ID NO: 1868 - RNA, 19 nt, Artificial Sequence
  Synthetic oligonucleotide
aaccaugugcuggcaauca

SEQ ID NO: 1869 - RNA, 19 nt, Artificial Sequence
  Synthetic oligonucleotide
ugauugccagcacaugguu

SEQ ID NO: 1870 - RNA, 19 nt, Artificial Sequence
  Synthetic oligonucleotide
accaugugcuggcaaucaa

SEQ ID NO: 1871 - RNA, 19 nt, Artificial Sequence
  Synthetic oligonucleotide
uugauugccagcacauggu

SEQ ID NO: 1872 - RNA, 19 nt, Artificial Sequence
  Synthetic oligonucleotide
caugugcuggcaaucaaga

SEQ ID NO: 1873 - RNA, 19 nt, Artificial Sequence
  Synthetic oligonucleotide
ucuugauugccagcacaug

SEQ ID NO: 1874 - RNA, 19 nt, Artificial Sequence
  Synthetic oligonucleotide
augugcuggcaaucaagga

SEQ ID NO: 1875 - RNA, 19 nt, Artificial Sequence
  Synthetic oligonucleotide
uccuugauugccagcacau

SEQ ID NO: 1876 - RNA, 19 nt, Artificial Sequence
  Synthetic oligonucleotide
ugugcuggcaaucaaggga

SEQ ID NO: 1877 - RNA, 19 nt, Artificial Sequence
  Synthetic oligonucleotide
ucccuugauugccagcaca

SEQ ID NO: 1878 - RNA, 19 nt, Artificial Sequence
  Synthetic oligonucleotide
caaucaagggacccagaua

SEQ ID NO: 1879 - RNA, 19 nt, Artificial Sequence
  Synthetic oligonucleotide
uaucugggucccuugauug

SEQ ID NO: 1880 - RNA, 19 nt, Artificial Sequence
  Synthetic oligonucleotide
caagggacccagaucacga

SEQ ID NO: 1881 - RNA, 19 nt, Artificial Sequence
  Synthetic oligonucleotide
ucgugaucugggucccuug

SEQ ID NO: 1882 - RNA, 19 nt, Artificial Sequence
  Synthetic oligonucleotide
aucacgguggaggaccuua

SEQ ID NO: 1883 - RNA, 19 nt, Artificial Sequence
  Synthetic oligonucleotide
uaagguccuccaccgugau

SEQ ID NO: 1884 - RNA, 19 nt, Artificial Sequence
  Synthetic oligonucleotide
ucacgguggaggaccuuua

SEQ ID NO: 1885 - RNA, 19 nt, Artificial Sequence
  Synthetic oligonucleotide
uaaagguccuccaccguga

SEQ ID NO: 1886 - RNA, 19 nt, Artificial Sequence
  Synthetic oligonucleotide
acauagccacgaggagaaa

SEQ ID NO: 1887 - RNA, 19 nt, Artificial Sequence
  Synthetic oligonucleotide
uuucuccucguggcuaugu

SEQ ID NO: 1888 - RNA, 19 nt, Artificial Sequence
  Synthetic oligonucleotide
cauagccacgaggagaaaa

SEQ ID NO: 1889 - RNA, 19 nt, Artificial Sequence
  Synthetic oligonucleotide
uuuucuccucguggcuaug

SEQ ID NO: 1890 - RNA, 19 nt, Artificial Sequence
  Synthetic oligonucleotide
agccacgaggagaaaagca

SEQ ID NO: 1891 - RNA, 19 nt, Artificial Sequence
  Synthetic oligonucleotide
ugcuuuucuccucguggcu

SEQ ID NO: 1892 - RNA, 19 nt, Artificial Sequence
  Synthetic oligonucleotide
gccacgaggagaaaagcua

SEQ ID NO: 1893 - RNA, 19 nt, Artificial Sequence
  Synthetic oligonucleotide
uagcuuuucuccucguggc

SEQ ID NO: 1894 - RNA, 19 nt, Artificial Sequence
  Synthetic oligonucleotide
ccacgaggagaaaagcuua

SEQ ID NO: 1895 - RNA, 19 nt, Artificial Sequence
  Synthetic oligonucleotide
uaagcuuuucuccucgugg

SEQ ID NO: 1896 - RNA, 19 nt, Artificial Sequence
  Synthetic oligonucleotide
cgaggagaaaagcuuuaaa

SEQ ID NO: 1897 - RNA, 19 nt, Artificial Sequence
  Synthetic oligonucleotide
uuuaaagcuuuucuccucg

SEQ ID NO: 1898 - RNA, 19 nt, Artificial Sequence
  Synthetic oligonucleotide
ugggaaaauuuuggaagua

SEQ ID NO: 1899 - RNA, 19 nt, Artificial Sequence
  Synthetic oligonucleotide
uacuuccaaaauuuuccca

SEQ ID NO: 1900 - RNA, 19 nt, Artificial Sequence
  Synthetic oligonucleotide
ggaaaauuuuggaaguuga

SEQ ID NO: 1901 - RNA, 19 nt, Artificial Sequence
  Synthetic oligonucleotide
ucaacuuccaaaauuuucc

SEQ ID NO: 1902 - RNA, 19 nt, Artificial Sequence
  Synthetic oligonucleotide
aaauuuuggaaguuguuga

SEQ ID NO: 1903 - RNA, 19 nt, Artificial Sequence
  Synthetic oligonucleotide
ucaacaacuuccaaaauuu

SEQ ID NO: 1904 - RNA, 19 nt, Artificial Sequence
  Synthetic oligonucleotide
aauuuuggaaguuguugga

SEQ ID NO: 1905 - RNA, 19 nt, Artificial Sequence
  Synthetic oligonucleotide
uccaacaacuuccaaaauu

SEQ ID NO: 1906 - RNA, 19 nt, Artificial Sequence
  Synthetic oligonucleotide
auuuuggaaguuguuggca

SEQ ID NO: 1907 - RNA, 19 nt, Artificial Sequence
  Synthetic oligonucleotide
ugccaacaacuuccaaaau

SEQ ID NO: 1908 - RNA, 19 nt, Artificial Sequence
  Synthetic oligonucleotide
gaaguuguuggcagguaua

SEQ ID NO: 1909 - RNA, 19 nt, Artificial Sequence
  Synthetic oligonucleotide
uauaccugccaacaacuuc

SEQ ID NO: 1910 - RNA, 19 nt, Artificial Sequence
  Synthetic oligonucleotide
aguuguuggcagguauuca

SEQ ID NO: 1911 - RNA, 19 nt, Artificial Sequence
  Synthetic oligonucleotide
ugaauaccugccaacaacu

SEQ ID NO: 1912 - RNA, 19 nt, Artificial Sequence
  Synthetic oligonucleotide
ggcagguauucaguacaca

SEQ ID NO: 1913 - RNA, 19 nt, Artificial Sequence
  Synthetic oligonucleotide
uguguacugaauaccugcc

SEQ ID NO: 1914 - RNA, 19 nt, Artificial Sequence
  Synthetic oligonucleotide
gcagguauucaguacacaa

SEQ ID NO: 1915 - RNA, 19 nt, Artificial Sequence
  Synthetic oligonucleotide
uuguguacugaauaccugc

SEQ ID NO: 1916 - RNA, 19 nt, Artificial Sequence
  Synthetic oligonucleotide
cagguauucaguacacaaa

SEQ ID NO: 1917 - RNA, 19 nt, Artificial Sequence
  Synthetic oligonucleotide
uuuguguacugaauaccug

SEQ ID NO: 1918 - RNA, 19 nt, Artificial Sequence
  Synthetic oligonucleotide
agguauucaguacacaaua

SEQ ID NO: 1919 - RNA, 19 nt, Artificial Sequence
  Synthetic oligonucleotide
uauuguguacugaauaccu

SEQ ID NO: 1920 - RNA, 19 nt, Artificial Sequence
  Synthetic oligonucleotide
gguauucaguacacaauga

SEQ ID NO: 1921 - RNA, 19 nt, Artificial Sequence
  Synthetic oligonucleotide
ucauuguguacugaauacc

SEQ ID NO: 1922 - RNA, 19 nt, Artificial Sequence
  Synthetic oligonucleotide
guauucaguacacaaugca

SEQ ID NO: 1923 - RNA, 19 nt, Artificial Sequence
  Synthetic oligonucleotide
ugcauuguguacugaauac

SEQ ID NO: 1924 - RNA, 19 nt, Artificial Sequence
  Synthetic oligonucleotide
uucaguacacaaugcagga

SEQ ID NO: 1925 - RNA, 19 nt, Artificial Sequence
  Synthetic oligonucleotide
uccugcauuguguacugaa

SEQ ID NO: 1926 - RNA, 19 nt, Artificial Sequence
  Synthetic oligonucleotide
uacacaaugcaggcauuaa

SEQ ID NO: 1927 - RNA, 19 nt, Artificial Sequence
  Synthetic oligonucleotide
uuaaugccugcauugugua

SEQ ID NO: 1928 - RNA, 19 nt, Artificial Sequence
  Synthetic oligonucleotide
cacaaugcaggcauuagua

SEQ ID NO: 1929 - RNA, 19 nt, Artificial Sequence
  Synthetic oligonucleotide
uacuaaugccugcauugug

SEQ ID NO: 1930 - RNA, 19 nt, Artificial Sequence
  Synthetic oligonucleotide
acaaugcaggcauuaguua

SEQ ID NO: 1931 - RNA, 19 nt, Artificial Sequence
  Synthetic oligonucleotide
uaacuaaugccugcauugu

SEQ ID NO: 1932 - RNA, 19 nt, Artificial Sequence
  Synthetic oligonucleotide
caaugcaggcauuaguuua

SEQ ID NO: 1933 - RNA, 19 nt, Artificial Sequence
  Synthetic oligonucleotide
uaaacuaaugccugcauug

SEQ ID NO: 1934 - RNA, 19 nt, Artificial Sequence
  Synthetic oligonucleotide
aaugcaggcauuaguuuca

SEQ ID NO: 1935 - RNA, 19 nt, Artificial Sequence
  Synthetic oligonucleotide
ugaaacuaaugccugcauu

SEQ ID NO: 1936 - RNA, 19 nt, Artificial Sequence
  Synthetic oligonucleotide
ugcaggcauuaguuucuca

SEQ ID NO: 1937 - RNA, 19 nt, Artificial Sequence
  Synthetic oligonucleotide
ugagaaacuaaugccugca

SEQ ID NO: 1938 - RNA, 19 nt, Artificial Sequence
  Synthetic oligonucleotide
gcaggcauuaguuucucaa

SEQ ID NO: 1939 - RNA, 19 nt, Artificial Sequence
  Synthetic oligonucleotide
uugagaaacuaaugccugc

SEQ ID NO: 1940 - RNA, 19 nt, Artificial Sequence
  Synthetic oligonucleotide
gcauuaguuucucaguuaa

SEQ ID NO: 1941 - RNA, 19 nt, Artificial Sequence
  Synthetic oligonucleotide
uuaacugagaaacuaaugc

SEQ ID NO: 1942 - RNA, 19 nt, Artificial Sequence
  Synthetic oligonucleotide
aaaacaaggagagacagua

SEQ ID NO: 1943 - RNA, 19 nt, Artificial Sequence
  Synthetic oligonucleotide
uacugucucuccuuguuuu

SEQ ID NO: 1944 - RNA, 19 nt, Artificial Sequence
  Synthetic oligonucleotide
aacaaggagagacaguaga

SEQ ID NO: 1945 - RNA, 19 nt, Artificial Sequence
  Synthetic oligonucleotide
ucuacugucucuccuuguu

SEQ ID NO: 1946 - RNA, 19 nt, Artificial Sequence
  Synthetic oligonucleotide
acaaggagagacaguagca

SEQ ID NO: 1947 - RNA, 19 nt, Artificial Sequence
  Synthetic oligonucleotide
ugcuacugucucuccuugu

SEQ ID NO: 1948 - RNA, 19 nt, Artificial Sequence
  Synthetic oligonucleotide
caaggagagacaguagcua

SEQ ID NO: 1949 - RNA, 19 nt, Artificial Sequence
  Synthetic oligonucleotide
uagcuacugucucuccuug

SEQ ID NO: 1950 - RNA, 19 nt, Artificial Sequence
  Synthetic oligonucleotide
gagacaguagcugauguua

SEQ ID NO: 1951 - RNA, 19 nt, Artificial Sequence
  Synthetic oligonucleotide
uaacaucagcuacugucuc

SEQ ID NO: 1952 - RNA, 19 nt, Artificial Sequence
  Synthetic oligonucleotide
agacaguagcugauguuaa

SEQ ID NO: 1953 - RNA, 19 nt, Artificial Sequence
  Synthetic oligonucleotide
uuaacaucagcuacugucu

SEQ ID NO: 1954 - RNA, 19 nt, Artificial Sequence
  Synthetic oligonucleotide
gacaguagcugauguuaga

SEQ ID NO: 1955 - RNA, 19 nt, Artificial Sequence
  Synthetic oligonucleotide
ucuaacaucagcuacuguc

SEQ ID NO: 1956 - RNA, 19 nt, Artificial Sequence
  Synthetic oligonucleotide
acaguagcugauguuagga

SEQ ID NO: 1957 - RNA, 19 nt, Artificial Sequence
  Synthetic oligonucleotide
uccuaacaucagcuacugu

SEQ ID NO: 1958 - RNA, 19 nt, Artificial Sequence
  Synthetic oligonucleotide
caguagcugauguuaggaa

SEQ ID NO: 1959 - RNA, 19 nt, Artificial Sequence
  Synthetic oligonucleotide
uuccuaacaucagcuacug

SEQ ID NO: 1960 - RNA, 19 nt, Artificial Sequence
  Synthetic oligonucleotide
aguagcugauguuaggaca

SEQ ID NO: 1961 - RNA, 19 nt, Artificial Sequence
  Synthetic oligonucleotide
uguccuaacaucagcuacu

SEQ ID NO: 1962 - RNA, 19 nt, Artificial Sequence
  Synthetic oligonucleotide
guagcugauguuaggacaa

SEQ ID NO: 1963 - RNA, 19 nt, Artificial Sequence
  Synthetic oligonucleotide
uuguccuaacaucagcuac

SEQ ID NO: 1964 - RNA, 19 nt, Artificial Sequence
  Synthetic oligonucleotide
uagcugauguuaggacaca

SEQ ID NO: 1965 - RNA, 19 nt, Artificial Sequence
  Synthetic oligonucleotide
uguguccuaacaucagcua

SEQ ID NO: 1966 - RNA, 19 nt, Artificial Sequence
  Synthetic oligonucleotide
agcugauguuaggacacua

SEQ ID NO: 1967 - RNA, 19 nt, Artificial Sequence
  Synthetic oligonucleotide
uaguguccuaacaucagcu

SEQ ID NO: 1968 - RNA, 19 nt, Artificial Sequence
  Synthetic oligonucleotide
gcugauguuaggacacuaa

SEQ ID NO: 1969 - RNA, 19 nt, Artificial Sequence
  Synthetic oligonucleotide
uuaguguccuaacaucagc

SEQ ID NO: 1970 - RNA, 19 nt, Artificial Sequence
  Synthetic oligonucleotide
ugauguuaggacacuacca

SEQ ID NO: 1971 - RNA, 19 nt, Artificial Sequence
  Synthetic oligonucleotide
ugguaguguccuaacauca

SEQ ID NO: 1972 - RNA, 19 nt, Artificial Sequence
  Synthetic oligonucleotide
guuaggacacuacccaaua

SEQ ID NO: 1973 - RNA, 19 nt, Artificial Sequence
  Synthetic oligonucleotide
uauuggguaguguccuaac

SEQ ID NO: 1974 - RNA, 19 nt, Artificial Sequence
  Synthetic oligonucleotide
uuaggacacuacccaauga

SEQ ID NO: 1975 - RNA, 19 nt, Artificial Sequence
  Synthetic oligonucleotide
ucauuggguaguguccuaa

SEQ ID NO: 1976 - RNA, 19 nt, Artificial Sequence
  Synthetic oligonucleotide
gacacuacccaaugccuca

SEQ ID NO: 1977 - RNA, 19 nt, Artificial Sequence
  Synthetic oligonucleotide
ugaggcauuggguaguguc

SEQ ID NO: 1978 - RNA, 19 nt, Artificial Sequence
  Synthetic oligonucleotide
acacuacccaaugccucaa

SEQ ID NO: 1979 - RNA, 19 nt, Artificial Sequence
  Synthetic oligonucleotide
uugaggcauuggguagugu

SEQ ID NO: 1980 - RNA, 19 nt, Artificial Sequence
  Synthetic oligonucleotide
cacuacccaaugccucaaa

SEQ ID NO: 1981 - RNA, 19 nt, Artificial Sequence
  Synthetic oligonucleotide
uuugaggcauuggguagug

SEQ ID NO: 1982 - RNA, 19 nt, Artificial Sequence
  Synthetic oligonucleotide
ugccucaaccguggacaaa

SEQ ID NO: 1983 - RNA, 19 nt, Artificial Sequence
  Synthetic oligonucleotide
uuuguccacgguugaggca

SEQ ID NO: 1984 - RNA, 19 nt, Artificial Sequence
  Synthetic oligonucleotide
gccucaaccguggacaaua

SEQ ID NO: 1985 - RNA, 19 nt, Artificial Sequence
  Synthetic oligonucleotide
uauuguccacgguugaggc

SEQ ID NO: 1986 - RNA, 19 nt, Artificial Sequence
  Synthetic oligonucleotide
cucaaccguggacaauaua

SEQ ID NO: 1987 - RNA, 19 nt, Artificial Sequence
  Synthetic oligonucleotide
uauauuguccacgguugag

SEQ ID NO: 1988 - RNA, 19 nt, Artificial Sequence
  Synthetic oligonucleotide
ucaaccguggacaauauua

SEQ ID NO: 1989 - RNA, 19 nt, Artificial Sequence
  Synthetic oligonucleotide
uaauauuguccacgguuga

SEQ ID NO: 1990 - RNA, 19 nt, Artificial Sequence
  Synthetic oligonucleotide
caaccguggacaauauuca

SEQ ID NO: 1991 - RNA, 19 nt, Artificial Sequence
  Synthetic oligonucleotide
ugaauauuguccacgguug

SEQ ID NO: 1992 - RNA, 19 nt, Artificial Sequence
  Synthetic oligonucleotide
aaccguggacaauauucga

SEQ ID NO: 1993 - RNA, 19 nt, Artificial Sequence
  Synthetic oligonucleotide
ucgaauauuguccacgguu

SEQ ID NO: 1994 - RNA, 19 nt, Artificial Sequence
  Synthetic oligonucleotide
accguggacaauauucgca

SEQ ID NO: 1995 - RNA, 19 nt, Artificial Sequence
  Synthetic oligonucleotide
ugcgaauauuguccacggu

SEQ ID NO: 1996 - RNA, 19 nt, Artificial Sequence
  Synthetic oligonucleotide
ccguggacaauauucgcua

SEQ ID NO: 1997 - RNA, 19 nt, Artificial Sequence
  Synthetic oligonucleotide
uagcgaauauuguccacgg

SEQ ID NO: 1998 - RNA, 19 nt, Artificial Sequence
  Synthetic oligonucleotide
acaauauucgcuccaucua

SEQ ID NO: 1999 - RNA, 19 nt, Artificial Sequence
  Synthetic oligonucleotide
uagauggagcgaauauugu

SEQ ID NO: 2000 - RNA, 19 nt, Artificial Sequence
  Synthetic oligonucleotide
caauauucgcuccaucuua

SEQ ID NO: 2001 - RNA, 19 nt, Artificial Sequence
  Synthetic oligonucleotide
uaagauggagcgaauauug

SEQ ID NO: 2002 - RNA, 19 nt, Artificial Sequence
  Synthetic oligonucleotide
aauauucgcuccaucuuua

SEQ ID NO: 2003 - RNA, 19 nt, Artificial Sequence
  Synthetic oligonucleotide
uaaagauggagcgaauauu

SEQ ID NO: 2004 - RNA, 19 nt, Artificial Sequence
  Synthetic oligonucleotide
uauucgcuccaucuuugga

SEQ ID NO: 2005 - RNA, 19 nt, Artificial Sequence
  Synthetic oligonucleotide
uccaaagauggagcgaaua

SEQ ID NO: 2006 - RNA, 19 nt, Artificial Sequence
  Synthetic oligonucleotide
auucgcuccaucuuuggaa

SEQ ID NO: 2007 - RNA, 19 nt, Artificial Sequence
  Synthetic oligonucleotide
uuccaaagauggagcgaau

SEQ ID NO: 2008 - RNA, 19 nt, Artificial Sequence
  Synthetic oligonucleotide
uucgcuccaucuuuggaaa

SEQ ID NO: 2009 - RNA, 19 nt, Artificial Sequence
  Synthetic oligonucleotide
uuuccaaagauggagcgaa

SEQ ID NO: 2010 - RNA, 19 nt, Artificial Sequence
  Synthetic oligonucleotide
ucgcuccaucuuuggaaaa

SEQ ID NO: 2011 - RNA, 19 nt, Artificial Sequence
  Synthetic oligonucleotide
uuuuccaaagauggagcga

SEQ ID NO: 2012 - RNA, 19 nt, Artificial Sequence
  Synthetic oligonucleotide
cgcuccaucuuuggaaaua

SEQ ID NO: 2013 - RNA, 19 nt, Artificial Sequence
  Synthetic oligonucleotide
uauuuccaaagauggagcg

SEQ ID NO: 2014 - RNA, 19 nt, Artificial Sequence
  Synthetic oligonucleotide
uccaucuuuggaaaugcua

SEQ ID NO: 2015 - RNA, 19 nt, Artificial Sequence
  Synthetic oligonucleotide
uagcauuuccaaagaugga

SEQ ID NO: 2016 - RNA, 19 nt, Artificial Sequence
  Synthetic oligonucleotide
aucuuuggaaaugcuguua

SEQ ID NO: 2017 - RNA, 19 nt, Artificial Sequence
  Synthetic oligonucleotide
uaacagcauuuccaaagau

SEQ ID NO: 2018 - RNA, 19 nt, Artificial Sequence
  Synthetic oligonucleotide
ucuuuggaaaugcuguuaa

SEQ ID NO: 2019 - RNA, 19 nt, Artificial Sequence
  Synthetic oligonucleotide
uuaacagcauuuccaaaga

SEQ ID NO: 2020 - RNA, 19 nt, Artificial Sequence
  Synthetic oligonucleotide
cuuuggaaaugcuguuaga

SEQ ID NO: 2021 - RNA, 19 nt, Artificial Sequence
  Synthetic oligonucleotide
ucuaacagcauuuccaaag

SEQ ID NO: 2022 - RNA, 19 nt, Artificial Sequence
  Synthetic oligonucleotide
uuggaaaugcuguuaguca

SEQ ID NO: 2023 - RNA, 19 nt, Artificial Sequence
  Synthetic oligonucleotide
ugacuaacagcauuuccaa

SEQ ID NO: 2024 - RNA, 19 nt, Artificial Sequence
  Synthetic oligonucleotide
uggaaaugcuguuagucga

SEQ ID NO: 2025 - RNA, 19 nt, Artificial Sequence
  Synthetic oligonucleotide
ucgacuaacagcauuucca

SEQ ID NO: 2026 - RNA, 19 nt, Artificial Sequence
  Synthetic oligonucleotide
ggaaaugcuguuagucgaa

SEQ ID NO: 2027 - RNA, 19 nt, Artificial Sequence
  Synthetic oligonucleotide
uucgacuaacagcauuucc

SEQ ID NO: 2028 - RNA, 19 nt, Artificial Sequence
  Synthetic oligonucleotide
gaaaugcuguuagucgaga

SEQ ID NO: 2029 - RNA, 19 nt, Artificial Sequence
  Synthetic oligonucleotide
ucucgacuaacagcauuuc

SEQ ID NO: 2030 - RNA, 19 nt, Artificial Sequence
  Synthetic oligonucleotide
aaaugcuguuagucgagaa

SEQ ID NO: 2031 - RNA, 19 nt, Artificial Sequence
  Synthetic oligonucleotide
uucucgacuaacagcauuu

SEQ ID NO: 2032 - RNA, 19 nt, Artificial Sequence
  Synthetic oligonucleotide
aaugcuguuagucgagaaa

SEQ ID NO: 2033 - RNA, 19 nt, Artificial Sequence
  Synthetic oligonucleotide
uuucucgacuaacagcauu

SEQ ID NO: 2034 - RNA, 19 nt, Artificial Sequence
  Synthetic oligonucleotide
augcuguuagucgagaaca

SEQ ID NO: 2035 - RNA, 19 nt, Artificial Sequence
  Synthetic oligonucleotide
uguucucgacuaacagcau

SEQ ID NO: 2036 - RNA, 19 nt, Artificial Sequence
  Synthetic oligonucleotide
ugcuguuagucgagaacua

SEQ ID NO: 2037 - RNA, 19 nt, Artificial Sequence
  Synthetic oligonucleotide
uaguucucgacuaacagca

SEQ ID NO: 2038 - RNA, 19 nt, Artificial Sequence
  Synthetic oligonucleotide
gcuguuagucgagaacuga

SEQ ID NO: 2039 - RNA, 19 nt, Artificial Sequence
  Synthetic oligonucleotide
ucaguucucgacuaacagc

SEQ ID NO: 2040 - RNA, 19 nt, Artificial Sequence
  Synthetic oligonucleotide
uguuagucgagaacugaua

SEQ ID NO: 2041 - RNA, 19 nt, Artificial Sequence
  Synthetic oligonucleotide
uaucaguucucgacuaaca

SEQ ID NO: 2042 - RNA, 19 nt, Artificial Sequence
  Synthetic oligonucleotide
guuagucgagaacugauaa

SEQ ID NO: 2043 - RNA, 19 nt, Artificial Sequence
  Synthetic oligonucleotide
uuaucaguucucgacuaac

SEQ ID NO: 2044 - RNA, 19 nt, Artificial Sequence
  Synthetic oligonucleotide
uuagucgagaacugauaga

SEQ ID NO: 2045 - RNA, 19 nt, Artificial Sequence
  Synthetic oligonucleotide
ucuaucaguucucgacuaa

SEQ ID NO: 2046 - RNA, 19 nt, Artificial Sequence
  Synthetic oligonucleotide
uagucgagaacugauagaa

SEQ ID NO: 2047 - RNA, 19 nt, Artificial Sequence
  Synthetic oligonucleotide
uucuaucaguucucgacua

SEQ ID NO: 2048 - RNA, 19 nt, Artificial Sequence
  Synthetic oligonucleotide
agucgagaacugauagaaa

SEQ ID NO: 2049 - RNA, 19 nt, Artificial Sequence
  Synthetic oligonucleotide
uuucuaucaguucucgacu

SEQ ID NO: 2050 - RNA, 19 nt, Artificial Sequence
  Synthetic oligonucleotide
gucgagaacugauagaaaa

SEQ ID NO: 2051 - RNA, 19 nt, Artificial Sequence
  Synthetic oligonucleotide
uuuucuaucaguucucgac

SEQ ID NO: 2052 - RNA, 19 nt, Artificial Sequence
  Synthetic oligonucleotide
ucgagaacugauagaaaua

SEQ ID NO: 2053 - RNA, 19 nt, Artificial Sequence
  Synthetic oligonucleotide
uauuucuaucaguucucga

SEQ ID NO: 2054 - RNA, 19 nt, Artificial Sequence
  Synthetic oligonucleotide
cgagaacugauagaaauua

SEQ ID NO: 2055 - RNA, 19 nt, Artificial Sequence
  Synthetic oligonucleotide
uaauuucuaucaguucucg

SEQ ID NO: 2056 - RNA, 19 nt, Artificial Sequence
  Synthetic oligonucleotide
agaacugauagaaauugga

SEQ ID NO: 2057 - RNA, 19 nt, Artificial Sequence
  Synthetic oligonucleotide
uccaauuucuaucaguucu

SEQ ID NO: 2058 - RNA, 19 nt, Artificial Sequence
  Synthetic oligonucleotide
gaacugauagaaauuggaa

SEQ ID NO: 2059 - RNA, 19 nt, Artificial Sequence
  Synthetic oligonucleotide
uuccaauuucuaucaguuc

SEQ ID NO: 2060 - RNA, 19 nt, Artificial Sequence
  Synthetic oligonucleotide
acugauagaaauuggauga

SEQ ID NO: 2061 - RNA, 19 nt, Artificial Sequence
  Synthetic oligonucleotide
ucauccaauuucuaucagu

SEQ ID NO: 2062 - RNA, 19 nt, Artificial Sequence
  Synthetic oligonucleotide
ugauagaaauuggauguga

SEQ ID NO: 2063 - RNA, 19 nt, Artificial Sequence
  Synthetic oligonucleotide
ucacauccaauuucuauca

SEQ ID NO: 2064 - RNA, 19 nt, Artificial Sequence
  Synthetic oligonucleotide
gauagaaauuggaugugaa

SEQ ID NO: 2065 - RNA, 19 nt, Artificial Sequence
  Synthetic oligonucleotide
uucacauccaauuucuauc

SEQ ID NO: 2066 - RNA, 19 nt, Artificial Sequence
  Synthetic oligonucleotide
uagaaauuggaugugagga

SEQ ID NO: 2067 - RNA, 19 nt, Artificial Sequence
  Synthetic oligonucleotide
uccucacauccaauuucua

SEQ ID NO: 2068 - RNA, 19 nt, Artificial Sequence
  Synthetic oligonucleotide
aauuggaugugaggauaaa

SEQ ID NO: 2069 - RNA, 19 nt, Artificial Sequence
  Synthetic oligonucleotide
uuuauccucacauccaauu

SEQ ID NO: 2070 - RNA, 19 nt, Artificial Sequence
  Synthetic oligonucleotide
auuggaugugaggauaaaa

SEQ ID NO: 2071 - RNA, 19 nt, Artificial Sequence
  Synthetic oligonucleotide
uuuuauccucacauccaau

SEQ ID NO: 2072 - RNA, 19 nt, Artificial Sequence
  Synthetic oligonucleotide
uggaugugaggauaaaaca

SEQ ID NO: 2073 - RNA, 19 nt, Artificial Sequence
  Synthetic oligonucleotide
uguuuuauccucacaucca

SEQ ID NO: 2074 - RNA, 19 nt, Artificial Sequence
  Synthetic oligonucleotide
gaugugaggauaaaaccca

SEQ ID NO: 2075 - RNA, 19 nt, Artificial Sequence
  Synthetic oligonucleotide
uggguuuuauccucacauc

SEQ ID NO: 2076 - RNA, 19 nt, Artificial Sequence
  Synthetic oligonucleotide
augugaggauaaaacccua

SEQ ID NO: 2077 - RNA, 19 nt, Artificial Sequence
  Synthetic oligonucleotide
uaggguuuuauccucacau

SEQ ID NO: 2078 - RNA, 19 nt, Artificial Sequence
  Synthetic oligonucleotide
ugugaggauaaaacccuaa

SEQ ID NO: 2079 - RNA, 19 nt, Artificial Sequence
  Synthetic oligonucleotide
uuaggguuuuauccucaca

SEQ ID NO: 2080 - RNA, 19 nt, Artificial Sequence
  Synthetic oligonucleotide
gugaggauaaaacccuaga

SEQ ID NO: 2081 - RNA, 19 nt, Artificial Sequence
  Synthetic oligonucleotide
ucuaggguuuuauccucac

SEQ ID NO: 2082 - RNA, 19 nt, Artificial Sequence
  Synthetic oligonucleotide
ggauaaaacccuagccuua

SEQ ID NO: 2083 - RNA, 19 nt, Artificial Sequence
  Synthetic oligonucleotide
uaaggcuaggguuuuaucc

SEQ ID NO: 2084 - RNA, 19 nt, Artificial Sequence
  Synthetic oligonucleotide
uaaaacccuagccuucaaa

SEQ ID NO: 2085 - RNA, 19 nt, Artificial Sequence
  Synthetic oligonucleotide
uuugaaggcuaggguuuua

SEQ ID NO: 2086 - RNA, 19 nt, Artificial Sequence
  Synthetic oligonucleotide
aacccuagccuucaaaaua

SEQ ID NO: 2087 - RNA, 19 nt, Artificial Sequence
  Synthetic oligonucleotide
uauuuugaaggcuaggguu

SEQ ID NO: 2088 - RNA, 19 nt, Artificial Sequence
  Synthetic oligonucleotide
acccuagccuucaaaauga

SEQ ID NO: 2089 - RNA, 19 nt, Artificial Sequence
  Synthetic oligonucleotide
ucauuuugaaggcuagggu

SEQ ID NO: 2090 - RNA, 19 nt, Artificial Sequence
  Synthetic oligonucleotide
cuagccuucaaaaugaaua

SEQ ID NO: 2091 - RNA, 19 nt, Artificial Sequence
  Synthetic oligonucleotide
uauucauuuugaaggcuag

SEQ ID NO: 2092 - RNA, 19 nt, Artificial Sequence
  Synthetic oligonucleotide
agccuucaaaaugaaugga

SEQ ID NO: 2093 - RNA, 19 nt, Artificial Sequence
  Synthetic oligonucleotide
uccauucauuuugaaggcu

SEQ ID NO: 2094 - RNA, 19 nt, Artificial Sequence
  Synthetic oligonucleotide
ucaaaaugaaugguuacaa

SEQ ID NO: 2095 - RNA, 19 nt, Artificial Sequence
  Synthetic oligonucleotide
uuguaaccauucauuuuga

SEQ ID NO: 2096 - RNA, 19 nt, Artificial Sequence
  Synthetic oligonucleotide
caaaaugaaugguuacaua

SEQ ID NO: 2097 - RNA, 19 nt, Artificial Sequence
  Synthetic oligonucleotide
uauguaaccauucauuuug

SEQ ID NO: 2098 - RNA, 19 nt, Artificial Sequence
  Synthetic oligonucleotide
aaaugaaugguuacauaua

SEQ ID NO: 2099 - RNA, 19 nt, Artificial Sequence
  Synthetic oligonucleotide
uauauguaaccauucauuu

SEQ ID NO: 2100 - RNA, 19 nt, Artificial Sequence
  Synthetic oligonucleotide
aaugaaugguuacauauca

SEQ ID NO: 2101 - RNA, 19 nt, Artificial Sequence
  Synthetic oligonucleotide
ugauauguaaccauucauu

SEQ ID NO: 2102 - RNA, 19 nt, Artificial Sequence
  Synthetic oligonucleotide
augaaugguuacauaucca

SEQ ID NO: 2103 - RNA, 19 nt, Artificial Sequence
  Synthetic oligonucleotide
uggauauguaaccauucau

SEQ ID NO: 2104 - RNA, 19 nt, Artificial Sequence
  Synthetic oligonucleotide
ugaaugguuacauauccaa

SEQ ID NO: 2105 - RNA, 19 nt, Artificial Sequence
  Synthetic oligonucleotide
uuggauauguaaccauuca

SEQ ID NO: 2106 - RNA, 19 nt, Artificial Sequence
  Synthetic oligonucleotide
gaaugguuacauauccaaa

SEQ ID NO: 2107 - RNA, 19 nt, Artificial Sequence
  Synthetic oligonucleotide
uuuggauauguaaccauuc

SEQ ID NO: 2108 - RNA, 19 nt, Artificial Sequence
  Synthetic oligonucleotide
gguuacauauccaaugcaa

SEQ ID NO: 2109 - RNA, 19 nt, Artificial Sequence
  Synthetic oligonucleotide
uugcauuggauauguaacc

SEQ ID NO: 2110 - RNA, 19 nt, Artificial Sequence
  Synthetic oligonucleotide
uuacauauccaaugcaaaa

SEQ ID NO: 2111 - RNA, 19 nt, Artificial Sequence
  Synthetic oligonucleotide
uuuugcauuggauauguaa

SEQ ID NO: 2112 - RNA, 19 nt, Artificial Sequence
  Synthetic oligonucleotide
uacauauccaaugcaaaca

SEQ ID NO: 2113 - RNA, 19 nt, Artificial Sequence
  Synthetic oligonucleotide
uguuugcauuggauaugua

SEQ ID NO: 2114 - RNA, 19 nt, Artificial Sequence
  Synthetic oligonucleotide
uauccaaugcaaacuacua

SEQ ID NO: 2115 - RNA, 19 nt, Artificial Sequence
  Synthetic oligonucleotide
uaguaguuugcauuggaua

SEQ ID NO: 2116 - RNA, 19 nt, Artificial Sequence
  Synthetic oligonucleotide
auccaaugcaaacuacuca

SEQ ID NO: 2117 - RNA, 19 nt, Artificial Sequence
  Synthetic oligonucleotide
ugaguaguuugcauuggau

SEQ ID NO: 2118 - RNA, 19 nt, Artificial Sequence
  Synthetic oligonucleotide
uccaaugcaaacuacucaa

SEQ ID NO: 2119 - RNA, 19 nt, Artificial Sequence
  Synthetic oligonucleotide
uugaguaguuugcauugga

SEQ ID NO: 2120 - RNA, 19 nt, Artificial Sequence
  Synthetic oligonucleotide
ccaaugcaaacuacucaga

SEQ ID NO: 2121 - RNA, 19 nt, Artificial Sequence
  Synthetic oligonucleotide
ucugaguaguuugcauugg

SEQ ID NO: 2122 - RNA, 19 nt, Artificial Sequence
  Synthetic oligonucleotide
caaugcaaacuacucagua

SEQ ID NO: 2123 - RNA, 19 nt, Artificial Sequence
  Synthetic oligonucleotide
uacugaguaguuugcauug

SEQ ID NO: 2124 - RNA, 19 nt, Artificial Sequence
  Synthetic oligonucleotide
augcaaacuacucagugaa

SEQ ID NO: 2125 - RNA, 19 nt, Artificial Sequence
  Synthetic oligonucleotide
uucacugaguaguuugcau

SEQ ID NO: 2126 - RNA, 19 nt, Artificial Sequence
  Synthetic oligonucleotide
caaacuacucagugaagaa

SEQ ID NO: 2127 - RNA, 19 nt, Artificial Sequence
  Synthetic oligonucleotide
uucuucacugaguaguuug

SEQ ID NO: 2128 - RNA, 19 nt, Artificial Sequence
  Synthetic oligonucleotide
aaacuacucagugaagaaa

SEQ ID NO: 2129 - RNA, 19 nt, Artificial Sequence
  Synthetic oligonucleotide
uuucuucacugaguaguuu

SEQ ID NO: 2130 - RNA, 19 nt, Artificial Sequence
  Synthetic oligonucleotide
aacuacucagugaagaaga

SEQ ID NO: 2131 - RNA, 19 nt, Artificial Sequence
  Synthetic oligonucleotide
ucuucuucacugaguaguu

SEQ ID NO: 2132 - RNA, 19 nt, Artificial Sequence
  Synthetic oligonucleotide
acucagugaagaagugcaa

SEQ ID NO: 2133 - RNA, 19 nt, Artificial Sequence
  Synthetic oligonucleotide
uugcacuucuucacugagu

SEQ ID NO: 2134 - RNA, 19 nt, Artificial Sequence
  Synthetic oligonucleotide
ucagugaagaagugcauca

SEQ ID NO: 2135 - RNA, 19 nt, Artificial Sequence
  Synthetic oligonucleotide
ugaugcacuucuucacuga

SEQ ID NO: 2136 - RNA, 19 nt, Artificial Sequence
  Synthetic oligonucleotide
cagugaagaagugcaucua

SEQ ID NO: 2137 - RNA, 19 nt, Artificial Sequence
  Synthetic oligonucleotide
uagaugcacuucuucacug

SEQ ID NO: 2138 - RNA, 19 nt, Artificial Sequence
  Synthetic oligonucleotide
gugaagaagugcaucuuca

SEQ ID NO: 2139 - RNA, 19 nt, Artificial Sequence
  Synthetic oligonucleotide
ugaagaugcacuucuucac

SEQ ID NO: 2140 - RNA, 19 nt, Artificial Sequence
  Synthetic oligonucleotide
ugaagaagugcaucuucua

SEQ ID NO: 2141 - RNA, 19 nt, Artificial Sequence
  Synthetic oligonucleotide
uagaagaugcacuucuuca

SEQ ID NO: 2142 - RNA, 19 nt, Artificial Sequence
  Synthetic oligonucleotide
agaagugcaucuucuuaca

SEQ ID NO: 2143 - RNA, 19 nt, Artificial Sequence
  Synthetic oligonucleotide
uguaagaagaugcacuucu

SEQ ID NO: 2144 - RNA, 19 nt, Artificial Sequence
  Synthetic oligonucleotide
aagugcaucuucuuacuca

SEQ ID NO: 2145 - RNA, 19 nt, Artificial Sequence
  Synthetic oligonucleotide
ugaguaagaagaugcacuu

SEQ ID NO: 2146 - RNA, 19 nt, Artificial Sequence
  Synthetic oligonucleotide
agugcaucuucuuacucua

SEQ ID NO: 2147 - RNA, 19 nt, Artificial Sequence
  Synthetic oligonucleotide
uagaguaagaagaugcacu

SEQ ID NO: 2148 - RNA, 19 nt, Artificial Sequence
  Synthetic oligonucleotide
gugcaucuucuuacucuua

SEQ ID NO: 2149 - RNA, 19 nt, Artificial Sequence
  Synthetic oligonucleotide
uaagaguaagaagaugcac

SEQ ID NO: 2150 - RNA, 19 nt, Artificial Sequence
  Synthetic oligonucleotide
ucuucuuacucuucaucaa

SEQ ID NO: 2151 - RNA, 19 nt, Artificial Sequence
  Synthetic oligonucleotide
uugaugaagaguaagaaga

SEQ ID NO: 2152 - RNA, 19 nt, Artificial Sequence
  Synthetic oligonucleotide
cuucuuacucuucaucaaa

SEQ ID NO: 2153 - RNA, 19 nt, Artificial Sequence
  Synthetic oligonucleotide
uuugaugaagaguaagaag

SEQ ID NO: 2154 - RNA, 19 nt, Artificial Sequence
  Synthetic oligonucleotide
ucuuacucuucaucaacca

SEQ ID NO: 2155 - RNA, 19 nt, Artificial Sequence
  Synthetic oligonucleotide
ugguugaugaagaguaaga

SEQ ID NO: 2156 - RNA, 19 nt, Artificial Sequence
  Synthetic oligonucleotide
uuacucuucaucaaccaua

SEQ ID NO: 2157 - RNA, 19 nt, Artificial Sequence
  Synthetic oligonucleotide
uaugguugaugaagaguaa

SEQ ID NO: 2158 - RNA, 19 nt, Artificial Sequence
  Synthetic oligonucleotide
acucuucaucaaccaucga

SEQ ID NO: 2159 - RNA, 19 nt, Artificial Sequence
  Synthetic oligonucleotide
ucgaugguugaugaagagu

SEQ ID NO: 2160 - RNA, 19 nt, Artificial Sequence
  Synthetic oligonucleotide
cucuucaucaaccaucgua

SEQ ID NO: 2161 - RNA, 19 nt, Artificial Sequence
  Synthetic oligonucleotide
uacgaugguugaugaagag

SEQ ID NO: 2162 - RNA, 19 nt, Artificial Sequence
  Synthetic oligonucleotide
cuucaucaaccaucgucua

SEQ ID NO: 2163 - RNA, 19 nt, Artificial Sequence
  Synthetic oligonucleotide
uagacgaugguugaugaag

SEQ ID NO: 2164 - RNA, 19 nt, Artificial Sequence
  Synthetic oligonucleotide
uucaucaaccaucgucuga

SEQ ID NO: 2165 - RNA, 19 nt, Artificial Sequence
  Synthetic oligonucleotide
ucagacgaugguugaugaa

SEQ ID NO: 2166 - RNA, 19 nt, Artificial Sequence
  Synthetic oligonucleotide
aucaaccaucgucugguaa

SEQ ID NO: 2167 - RNA, 19 nt, Artificial Sequence
  Synthetic oligonucleotide
uuaccagacgaugguugau

SEQ ID NO: 2168 - RNA, 19 nt, Artificial Sequence
  Synthetic oligonucleotide
ucaaccaucgucugguaga

SEQ ID NO: 2169 - RNA, 19 nt, Artificial Sequence
  Synthetic oligonucleotide
ucuaccagacgaugguuga

SEQ ID NO: 2170 - RNA, 19 nt, Artificial Sequence
  Synthetic oligonucleotide
caaccaucgucugguagaa

SEQ ID NO: 2171 - RNA, 19 nt, Artificial Sequence
  Synthetic oligonucleotide
uucuaccagacgaugguug

SEQ ID NO: 2172 - RNA, 19 nt, Artificial Sequence
  Synthetic oligonucleotide
aaccaucgucugguagaaa

SEQ ID NO: 2173 - RNA, 19 nt, Artificial Sequence
  Synthetic oligonucleotide
uuucuaccagacgaugguu

SEQ ID NO: 2174 - RNA, 19 nt, Artificial Sequence
  Synthetic oligonucleotide
ccaucgucugguagaauca

SEQ ID NO: 2175 - RNA, 19 nt, Artificial Sequence
  Synthetic oligonucleotide
ugauucuaccagacgaugg

SEQ ID NO: 2176 - RNA, 19 nt, Artificial Sequence
  Synthetic oligonucleotide
caucgucugguagaaucaa

SEQ ID NO: 2177 - RNA, 19 nt, Artificial Sequence
  Synthetic oligonucleotide
uugauucuaccagacgaug

SEQ ID NO: 2178 - RNA, 19 nt, Artificial Sequence
  Synthetic oligonucleotide
aucgucugguagaaucaaa

SEQ ID NO: 2179 - RNA, 19 nt, Artificial Sequence
  Synthetic oligonucleotide
uuugauucuaccagacgau

SEQ ID NO: 2180 - RNA, 19 nt, Artificial Sequence
  Synthetic oligonucleotide
cgucugguagaaucaacua

SEQ ID NO: 2181 - RNA, 19 nt, Artificial Sequence
  Synthetic oligonucleotide
uaguugauucuaccagacg

SEQ ID NO: 2182 - RNA, 19 nt, Artificial Sequence
  Synthetic oligonucleotide
ucugguagaaucaacuuca

SEQ ID NO: 2183 - RNA, 19 nt, Artificial Sequence
  Synthetic oligonucleotide
ugaaguugauucuaccaga

SEQ ID NO: 2184 - RNA, 19 nt, Artificial Sequence
  Synthetic oligonucleotide
cugguagaaucaacuucca

SEQ ID NO: 2185 - RNA, 19 nt, Artificial Sequence
  Synthetic oligonucleotide
uggaaguugauucuaccag

SEQ ID NO: 2186 - RNA, 19 nt, Artificial Sequence
  Synthetic oligonucleotide
ugguagaaucaacuuccua

SEQ ID NO: 2187 - RNA, 19 nt, Artificial Sequence
  Synthetic oligonucleotide
uaggaaguugauucuacca

SEQ ID NO: 2188 - RNA, 19 nt, Artificial Sequence
  Synthetic oligonucleotide
gaaucaacuuccuugagaa

SEQ ID NO: 2189 - RNA, 19 nt, Artificial Sequence
  Synthetic oligonucleotide
uucucaaggaaguugauuc

SEQ ID NO: 2190 - RNA, 19 nt, Artificial Sequence
  Synthetic oligonucleotide
aaucaacuuccuugagaaa

SEQ ID NO: 2191 - RNA, 19 nt, Artificial Sequence
  Synthetic oligonucleotide
uuucucaaggaaguugauu

SEQ ID NO: 2192 - RNA, 19 nt, Artificial Sequence
  Synthetic oligonucleotide
caacuuccuugagaaaaga

SEQ ID NO: 2193 - RNA, 19 nt, Artificial Sequence
  Synthetic oligonucleotide
ucuuuucucaaggaaguug

SEQ ID NO: 2194 - RNA, 19 nt, Artificial Sequence
  Synthetic oligonucleotide
aacuuccuugagaaaagca

SEQ ID NO: 2195 - RNA, 19 nt, Artificial Sequence
  Synthetic oligonucleotide
ugcuuuucucaaggaaguu

SEQ ID NO: 2196 - RNA, 19 nt, Artificial Sequence
  Synthetic oligonucleotide
acuuccuugagaaaagcca

SEQ ID NO: 2197 - RNA, 19 nt, Artificial Sequence
  Synthetic oligonucleotide
uggcuuuucucaaggaagu

SEQ ID NO: 2198 - RNA, 19 nt, Artificial Sequence
  Synthetic oligonucleotide
uuccuugagaaaagccaua

SEQ ID NO: 2199 - RNA, 19 nt, Artificial Sequence
  Synthetic oligonucleotide
uauggcuuuucucaaggaa

SEQ ID NO: 2200 - RNA, 19 nt, Artificial Sequence
  Synthetic oligonucleotide
ccuugagaaaagccauaga

SEQ ID NO: 2201 - RNA, 19 nt, Artificial Sequence
  Synthetic oligonucleotide
ucuauggcuuuucucaagg

SEQ ID NO: 2202 - RNA, 19 nt, Artificial Sequence
  Synthetic oligonucleotide
ugagaaaagccauagaaaa

SEQ ID NO: 2203 - RNA, 19 nt, Artificial Sequence
  Synthetic oligonucleotide
uuuucuauggcuuuucuca

SEQ ID NO: 2204 - RNA, 19 nt, Artificial Sequence
  Synthetic oligonucleotide
agccauagaaacaguguaa

SEQ ID NO: 2205 - RNA, 19 nt, Artificial Sequence
  Synthetic oligonucleotide
uuacacuguuucuauggcu

SEQ ID NO: 2206 - RNA, 19 nt, Artificial Sequence
  Synthetic oligonucleotide
cauagaaacaguguaugca

SEQ ID NO: 2207 - RNA, 19 nt, Artificial Sequence
  Synthetic oligonucleotide
ugcauacacuguuucuaug

SEQ ID NO: 2208 - RNA, 19 nt, Artificial Sequence
  Synthetic oligonucleotide
uagaaacaguguaugcaga

SEQ ID NO: 2209 - RNA, 19 nt, Artificial Sequence
  Synthetic oligonucleotide
ucugcauacacuguuucua

SEQ ID NO: 2210 - RNA, 19 nt, Artificial Sequence
  Synthetic oligonucleotide
agaaacaguguaugcagca

SEQ ID NO: 2211 - RNA, 19 nt, Artificial Sequence
  Synthetic oligonucleotide
ugcugcauacacuguuucu

SEQ ID NO: 2212 - RNA, 19 nt, Artificial Sequence
  Synthetic oligonucleotide
acaguguaugcagccuaua

SEQ ID NO: 2213 - RNA, 19 nt, Artificial Sequence
  Synthetic oligonucleotide
uauaggcugcauacacugu

SEQ ID NO: 2214 - RNA, 19 nt, Artificial Sequence
  Synthetic oligonucleotide
caguguaugcagccuauua

SEQ ID NO: 2215 - RNA, 19 nt, Artificial Sequence
  Synthetic oligonucleotide
uaauaggcugcauacacug

SEQ ID NO: 2216 - RNA, 19 nt, Artificial Sequence
  Synthetic oligonucleotide
guguaugcagccuauuuga

SEQ ID NO: 2217 - RNA, 19 nt, Artificial Sequence
  Synthetic oligonucleotide
ucaaauaggcugcauacac

SEQ ID NO: 2218 - RNA, 19 nt, Artificial Sequence
  Synthetic oligonucleotide
uguaugcagccuauuugca

SEQ ID NO: 2219 - RNA, 19 nt, Artificial Sequence
  Synthetic oligonucleotide
ugcaaauaggcugcauaca

SEQ ID NO: 2220 - RNA, 19 nt, Artificial Sequence
  Synthetic oligonucleotide
guaugcagccuauuugcca

SEQ ID NO: 2221 - RNA, 19 nt, Artificial Sequence
  Synthetic oligonucleotide
uggcaaauaggcugcauac

SEQ ID NO: 2222 - RNA, 19 nt, Artificial Sequence
  Synthetic oligonucleotide
gcagccuauuugcccaaaa

SEQ ID NO: 2223 - RNA, 19 nt, Artificial Sequence
  Synthetic oligonucleotide
uuuugggcaaauaggcugc

SEQ ID NO: 2224 - RNA, 19 nt, Artificial Sequence
  Synthetic oligonucleotide
aaacacacacccauuccua

SEQ ID NO: 2225 - RNA, 19 nt, Artificial Sequence
  Synthetic oligonucleotide
uaggaauggguguguguuu

SEQ ID NO: 2226 - RNA, 19 nt, Artificial Sequence
  Synthetic oligonucleotide
aacacacacccauuccuga

SEQ ID NO: 2227 - RNA, 19 nt, Artificial Sequence
  Synthetic oligonucleotide
ucaggaauggguguguguu

SEQ ID NO: 2228 - RNA, 19 nt, Artificial Sequence
  Synthetic oligonucleotide
acacacacccauuccugua

SEQ ID NO: 2229 - RNA, 19 nt, Artificial Sequence
  Synthetic oligonucleotide
uacaggaaugggugugugu

SEQ ID NO: 2230 - RNA, 19 nt, Artificial Sequence
  Synthetic oligonucleotide
cacacacccauuccuguaa

SEQ ID NO: 2231 - RNA, 19 nt, Artificial Sequence
  Synthetic oligonucleotide
uuacaggaaugggugugug

SEQ ID NO: 2232 - RNA, 19 nt, Artificial Sequence
  Synthetic oligonucleotide
acacacccauuccuguaca

SEQ ID NO: 2233 - RNA, 19 nt, Artificial Sequence
  Synthetic oligonucleotide
uguacaggaaugggugugu

SEQ ID NO: 2234 - RNA, 19 nt, Artificial Sequence
  Synthetic oligonucleotide
acacccauuccuguaccua

SEQ ID NO: 2235 - RNA, 19 nt, Artificial Sequence
  Synthetic oligonucleotide
uagguacaggaaugggugu

SEQ ID NO: 2236 - RNA, 19 nt, Artificial Sequence
  Synthetic oligonucleotide
acccauuccuguaccucaa

SEQ ID NO: 2237 - RNA, 19 nt, Artificial Sequence
  Synthetic oligonucleotide
uugagguacaggaaugggu

SEQ ID NO: 2238 - RNA, 19 nt, Artificial Sequence
  Synthetic oligonucleotide
cccauuccuguaccucaga

SEQ ID NO: 2239 - RNA, 19 nt, Artificial Sequence
  Synthetic oligonucleotide
ucugagguacaggaauggg

SEQ ID NO: 2240 - RNA, 19 nt, Artificial Sequence
  Synthetic oligonucleotide
cauuccuguaccucaguua

SEQ ID NO: 2241 - RNA, 19 nt, Artificial Sequence
  Synthetic oligonucleotide
uaacugagguacaggaaug

SEQ ID NO: 2242 - RNA, 19 nt, Artificial Sequence
  Synthetic oligonucleotide
uuccuguaccucaguuuaa

SEQ ID NO: 2243 - RNA, 19 nt, Artificial Sequence
  Synthetic oligonucleotide
uuaaacugagguacaggaa

SEQ ID NO: 2244 - RNA, 19 nt, Artificial Sequence
  Synthetic oligonucleotide
uccuguaccucaguuuaga

SEQ ID NO: 2245 - RNA, 19 nt, Artificial Sequence
  Synthetic oligonucleotide
ucuaaacugagguacagga

SEQ ID NO: 2246 - RNA, 19 nt, Artificial Sequence
  Synthetic oligonucleotide
ccuguaccucaguuuagaa

SEQ ID NO: 2247 - RNA, 19 nt, Artificial Sequence
  Synthetic oligonucleotide
uucuaaacugagguacagg

SEQ ID NO: 2248 - RNA, 19 nt, Artificial Sequence
  Synthetic oligonucleotide
guaccucaguuuagaaaua

SEQ ID NO: 2249 - RNA, 19 nt, Artificial Sequence
  Synthetic oligonucleotide
uauuucuaaacugagguac

SEQ ID NO: 2250 - RNA, 19 nt, Artificial Sequence
  Synthetic oligonucleotide
cucaguuuagaaaucagua

SEQ ID NO: 2251 - RNA, 19 nt, Artificial Sequence
  Synthetic oligonucleotide
uacugauuucuaaacugag

SEQ ID NO: 2252 - RNA, 19 nt, Artificial Sequence
  Synthetic oligonucleotide
ucaguuuagaaaucaguca

SEQ ID NO: 2253 - RNA, 19 nt, Artificial Sequence
  Synthetic oligonucleotide
ugacugauuucuaaacuga

SEQ ID NO: 2254 - RNA, 19 nt, Artificial Sequence
  Synthetic oligonucleotide
caguuuagaaaucagucca

SEQ ID NO: 2255 - RNA, 19 nt, Artificial Sequence
  Synthetic oligonucleotide
uggacugauuucuaaacug

SEQ ID NO: 2256 - RNA, 19 nt, Artificial Sequence
  Synthetic oligonucleotide
aaucaguccccagaaugua

SEQ ID NO: 2257 - RNA, 19 nt, Artificial Sequence
  Synthetic oligonucleotide
uacauucuggggacugauu

SEQ ID NO: 2258 - RNA, 19 nt, Artificial Sequence
  Synthetic oligonucleotide
ucaguccccagaaugugga

SEQ ID NO: 2259 - RNA, 19 nt, Artificial Sequence
  Synthetic oligonucleotide
uccacauucuggggacuga

SEQ ID NO: 2260 - RNA, 19 nt, Artificial Sequence
  Synthetic oligonucleotide
caguccccagaauguggaa

SEQ ID NO: 2261 - RNA, 19 nt, Artificial Sequence
  Synthetic oligonucleotide
uuccacauucuggggacug

SEQ ID NO: 2262 - RNA, 19 nt, Artificial Sequence
  Synthetic oligonucleotide
aguccccagaauguggaua

SEQ ID NO: 2263 - RNA, 19 nt, Artificial Sequence
  Synthetic oligonucleotide
uauccacauucuggggacu

SEQ ID NO: 2264 - RNA, 19 nt, Artificial Sequence
  Synthetic oligonucleotide
uccccagaauguggaugua

SEQ ID NO: 2265 - RNA, 19 nt, Artificial Sequence
  Synthetic oligonucleotide
uacauccacauucugggga

SEQ ID NO: 2266 - RNA, 19 nt, Artificial Sequence
  Synthetic oligonucleotide
ccccagaauguggauguua

SEQ ID NO: 2267 - RNA, 19 nt, Artificial Sequence
  Synthetic oligonucleotide
uaacauccacauucugggg

SEQ ID NO: 2268 - RNA, 19 nt, Artificial Sequence
  Synthetic oligonucleotide
cccagaauguggauguuaa

SEQ ID NO: 2269 - RNA, 19 nt, Artificial Sequence
  Synthetic oligonucleotide
uuaacauccacauucuggg

SEQ ID NO: 2270 - RNA, 19 nt, Artificial Sequence
  Synthetic oligonucleotide
ccagaauguggauguuaaa

SEQ ID NO: 2271 - RNA, 19 nt, Artificial Sequence
  Synthetic oligonucleotide
uuuaacauccacauucugg

SEQ ID NO: 2272 - RNA, 19 nt, Artificial Sequence
  Synthetic oligonucleotide
cagaauguggauguuaaua

SEQ ID NO: 2273 - RNA, 19 nt, Artificial Sequence
  Synthetic oligonucleotide
uauuaacauccacauucug

SEQ ID NO: 2274 - RNA, 19 nt, Artificial Sequence
  Synthetic oligonucleotide
auguggauguuaaugugca

SEQ ID NO: 2275 - RNA, 19 nt, Artificial Sequence
  Synthetic oligonucleotide
ugcacauuaacauccacau

SEQ ID NO: 2276 - RNA, 19 nt, Artificial Sequence
  Synthetic oligonucleotide
uguggauguuaaugugcaa

SEQ ID NO: 2277 - RNA, 19 nt, Artificial Sequence
  Synthetic oligonucleotide
uugcacauuaacauccaca

SEQ ID NO: 2278 - RNA, 19 nt, Artificial Sequence
  Synthetic oligonucleotide
guggauguuaaugugcaca

SEQ ID NO: 2279 - RNA, 19 nt, Artificial Sequence
  Synthetic oligonucleotide
ugugcacauuaacauccac

SEQ ID NO: 2280 - RNA, 19 nt, Artificial Sequence
  Synthetic oligonucleotide
uaaugugcaccccacaaaa

SEQ ID NO: 2281 - RNA, 19 nt, Artificial Sequence
  Synthetic oligonucleotide
uuuuguggggugcacauua

SEQ ID NO: 2282 - RNA, 19 nt, Artificial Sequence
  Synthetic oligonucleotide
aaugugcaccccacaaaga

SEQ ID NO: 2283 - RNA, 19 nt, Artificial Sequence
  Synthetic oligonucleotide
ucuuuguggggugcacauu

SEQ ID NO: 2284 - RNA, 19 nt, Artificial Sequence
  Synthetic oligonucleotide
ugcaccccacaaagcauga

SEQ ID NO: 2285 - RNA, 19 nt, Artificial Sequence
  Synthetic oligonucleotide
ucaugcuuuguggggugca

SEQ ID NO: 2286 - RNA, 19 nt, Artificial Sequence
  Synthetic oligonucleotide
gcaccccacaaagcaugaa

SEQ ID NO: 2287 - RNA, 19 nt, Artificial Sequence
  Synthetic oligonucleotide
uucaugcuuuguggggugc

SEQ ID NO: 2288 - RNA, 19 nt, Artificial Sequence
  Synthetic oligonucleotide
cccacaaagcaugaaguua

SEQ ID NO: 2289 - RNA, 19 nt, Artificial Sequence
  Synthetic oligonucleotide
uaacuucaugcuuuguggg

SEQ ID NO: 2290 - RNA, 19 nt, Artificial Sequence
  Synthetic oligonucleotide
ccacaaagcaugaaguuca

SEQ ID NO: 2291 - RNA, 19 nt, Artificial Sequence
  Synthetic oligonucleotide
ugaacuucaugcuuugugg

SEQ ID NO: 2292 - RNA, 19 nt, Artificial Sequence
  Synthetic oligonucleotide
caaagcaugaaguucacua

SEQ ID NO: 2293 - RNA, 19 nt, Artificial Sequence
  Synthetic oligonucleotide
uagugaacuucaugcuuug

SEQ ID NO: 2294 - RNA, 19 nt, Artificial Sequence
  Synthetic oligonucleotide
aaagcaugaaguucacuua

SEQ ID NO: 2295 - RNA, 19 nt, Artificial Sequence
  Synthetic oligonucleotide
uaagugaacuucaugcuuu

SEQ ID NO: 2296 - RNA, 19 nt, Artificial Sequence
  Synthetic oligonucleotide
aagcaugaaguucacuuca

SEQ ID NO: 2297 - RNA, 19 nt, Artificial Sequence
  Synthetic oligonucleotide
ugaagugaacuucaugcuu

SEQ ID NO: 2298 - RNA, 19 nt, Artificial Sequence
  Synthetic oligonucleotide
gcaugaaguucacuuccua

SEQ ID NO: 2299 - RNA, 19 nt, Artificial Sequence
  Synthetic oligonucleotide
uaggaagugaacuucaugc

SEQ ID NO: 2300 - RNA, 19 nt, Artificial Sequence
  Synthetic oligonucleotide
ccugcacgaggagagcaua

SEQ ID NO: 2301 - RNA, 19 nt, Artificial Sequence
  Synthetic oligonucleotide
uaugcucuccucgugcagg

SEQ ID NO: 2302 - RNA, 19 nt, Artificial Sequence
  Synthetic oligonucleotide
cugcacgaggagagcauca

SEQ ID NO: 2303 - RNA, 19 nt, Artificial Sequence
  Synthetic oligonucleotide
ugaugcucuccucgugcag

SEQ ID NO: 2304 - RNA, 19 nt, Artificial Sequence
  Synthetic oligonucleotide
cgaggagagcauccuggaa

SEQ ID NO: 2305 - RNA, 19 nt, Artificial Sequence
  Synthetic oligonucleotide
uuccaggaugcucuccucg

SEQ ID NO: 2306 - RNA, 19 nt, Artificial Sequence
  Synthetic oligonucleotide
ggugcagcagcacaucgaa

SEQ ID NO: 2307 - RNA, 19 nt, Artificial Sequence
  Synthetic oligonucleotide
uucgaugugcugcugcacc

SEQ ID NO: 2308 - RNA, 19 nt, Artificial Sequence
  Synthetic oligonucleotide
cagcacaucgagagcaaga

SEQ ID NO: 2309 - RNA, 19 nt, Artificial Sequence
  Synthetic oligonucleotide
ucuugcucucgaugugcug

SEQ ID NO: 2310 - RNA, 19 nt, Artificial Sequence
  Synthetic oligonucleotide
gcacaucgagagcaagcua

SEQ ID NO: 2311 - RNA, 19 nt, Artificial Sequence
  Synthetic oligonucleotide
uagcuugcucucgaugugc

SEQ ID NO: 2312 - RNA, 19 nt, Artificial Sequence
  Synthetic oligonucleotide
caucgagagcaagcuccua

SEQ ID NO: 2313 - RNA, 19 nt, Artificial Sequence
  Synthetic oligonucleotide
uaggagcuugcucucgaug

SEQ ID NO: 2314 - RNA, 19 nt, Artificial Sequence
  Synthetic oligonucleotide
aagcuccugggcuccaaua

SEQ ID NO: 2315 - RNA, 19 nt, Artificial Sequence
  Synthetic oligonucleotide
uauuggagcccaggagcuu

SEQ ID NO: 2316 - RNA, 19 nt, Artificial Sequence
  Synthetic oligonucleotide
agcuccugggcuccaauua

SEQ ID NO: 2317 - RNA, 19 nt, Artificial Sequence
  Synthetic oligonucleotide
uaauuggagcccaggagcu

SEQ ID NO: 2318 - RNA, 19 nt, Artificial Sequence
  Synthetic oligonucleotide
cuccugggcuccaauucca

SEQ ID NO: 2319 - RNA, 19 nt, Artificial Sequence
  Synthetic oligonucleotide
uggaauuggagcccaggag

SEQ ID NO: 2320 - RNA, 19 nt, Artificial Sequence
  Synthetic oligonucleotide
uccugggcuccaauuccua

SEQ ID NO: 2321 - RNA, 19 nt, Artificial Sequence
  Synthetic oligonucleotide
uaggaauuggagcccagga

SEQ ID NO: 2322 - RNA, 19 nt, Artificial Sequence
  Synthetic oligonucleotide
ccugggcuccaauuccuca

SEQ ID NO: 2323 - RNA, 19 nt, Artificial Sequence
  Synthetic oligonucleotide
ugaggaauuggagcccagg

SEQ ID NO: 2324 - RNA, 19 nt, Artificial Sequence
  Synthetic oligonucleotide
cuccaauuccuccaggaua

SEQ ID NO: 2325 - RNA, 19 nt, Artificial Sequence
  Synthetic oligonucleotide
uauccuggaggaauuggag

SEQ ID NO: 2326 - RNA, 19 nt, Artificial Sequence
  Synthetic oligonucleotide
ccaauuccuccaggaugua

SEQ ID NO: 2327 - RNA, 19 nt, Artificial Sequence
  Synthetic oligonucleotide
uacauccuggaggaauugg

SEQ ID NO: 2328 - RNA, 19 nt, Artificial Sequence
  Synthetic oligonucleotide
aauuccuccaggauguaca

SEQ ID NO: 2329 - RNA, 19 nt, Artificial Sequence
  Synthetic oligonucleotide
uguacauccuggaggaauu

SEQ ID NO: 2330 - RNA, 19 nt, Artificial Sequence
  Synthetic oligonucleotide
auuccuccaggauguacua

SEQ ID NO: 2331 - RNA, 19 nt, Artificial Sequence
  Synthetic oligonucleotide
uaguacauccuggaggaau

SEQ ID NO: 2332 - RNA, 19 nt, Artificial Sequence
  Synthetic oligonucleotide
uuccuccaggauguacuua

SEQ ID NO: 2333 - RNA, 19 nt, Artificial Sequence
  Synthetic oligonucleotide
uaaguacauccuggaggaa

SEQ ID NO: 2334 - RNA, 19 nt, Artificial Sequence
  Synthetic oligonucleotide
ccuccaggauguacuucaa

SEQ ID NO: 2335 - RNA, 19 nt, Artificial Sequence
  Synthetic oligonucleotide
uugaaguacauccuggagg

SEQ ID NO: 2336 - RNA, 19 nt, Artificial Sequence
  Synthetic oligonucleotide
cuccaggauguacuucaca

SEQ ID NO: 2337 - RNA, 19 nt, Artificial Sequence
  Synthetic oligonucleotide
ugugaaguacauccuggag

SEQ ID NO: 2338 - RNA, 19 nt, Artificial Sequence
  Synthetic oligonucleotide
caggauguacuucacccaa

SEQ ID NO: 2339 - RNA, 19 nt, Artificial Sequence
  Synthetic oligonucleotide
uugggugaaguacauccug

SEQ ID NO: 2340 - RNA, 19 nt, Artificial Sequence
  Synthetic oligonucleotide
uguacuucacccagacuua

SEQ ID NO: 2341 - RNA, 19 nt, Artificial Sequence
  Synthetic oligonucleotide
uaagucugggugaaguaca

SEQ ID NO: 2342 - RNA, 19 nt, Artificial Sequence
  Synthetic oligonucleotide
uacuucacccagacuuuga

SEQ ID NO: 2343 - RNA, 19 nt, Artificial Sequence
  Synthetic oligonucleotide
ucaaagucugggugaagua

SEQ ID NO: 2344 - RNA, 19 nt, Artificial Sequence
  Synthetic oligonucleotide
cuucacccagacuuugcua

SEQ ID NO: 2345 - RNA, 19 nt, Artificial Sequence
  Synthetic oligonucleotide
uagcaaagucugggugaag

SEQ ID NO: 2346 - RNA, 19 nt, Artificial Sequence
  Synthetic oligonucleotide
uucacccagacuuugcuaa

SEQ ID NO: 2347 - RNA, 19 nt, Artificial Sequence
  Synthetic oligonucleotide
uuagcaaagucugggugaa

SEQ ID NO: 2348 - RNA, 19 nt, Artificial Sequence
  Synthetic oligonucleotide
ucacccagacuuugcuaca

SEQ ID NO: 2349 - RNA, 19 nt, Artificial Sequence
  Synthetic oligonucleotide
uguagcaaagucuggguga

SEQ ID NO: 2350 - RNA, 19 nt, Artificial Sequence
  Synthetic oligonucleotide
acccagacuuugcuaccaa

SEQ ID NO: 2351 - RNA, 19 nt, Artificial Sequence
  Synthetic oligonucleotide
uugguagcaaagucugggu

SEQ ID NO: 2352 - RNA, 19 nt, Artificial Sequence
  Synthetic oligonucleotide
cagacuuugcuaccaggaa

SEQ ID NO: 2353 - RNA, 19 nt, Artificial Sequence
  Synthetic oligonucleotide
uuccugguagcaaagucug

SEQ ID NO: 2354 - RNA, 19 nt, Artificial Sequence
  Synthetic oligonucleotide
acuuugcuaccaggacuua

SEQ ID NO: 2355 - RNA, 19 nt, Artificial Sequence
  Synthetic oligonucleotide
uaaguccugguagcaaagu

SEQ ID NO: 2356 - RNA, 19 nt, Artificial Sequence
  Synthetic oligonucleotide
cuuugcuaccaggacuuga

SEQ ID NO: 2357 - RNA, 19 nt, Artificial Sequence
  Synthetic oligonucleotide
ucaaguccugguagcaaag

SEQ ID NO: 2358 - RNA, 19 nt, Artificial Sequence
  Synthetic oligonucleotide
uugcuaccaggacuugcua

SEQ ID NO: 2359 - RNA, 19 nt, Artificial Sequence
  Synthetic oligonucleotide
uagcaaguccugguagcaa

SEQ ID NO: 2360 - RNA, 19 nt, Artificial Sequence
  Synthetic oligonucleotide
ugcuaccaggacuugcuga

SEQ ID NO: 2361 - RNA, 19 nt, Artificial Sequence
  Synthetic oligonucleotide
ucagcaaguccugguagca

SEQ ID NO: 2362 - RNA, 19 nt, Artificial Sequence
  Synthetic oligonucleotide
cucuggggagaugguuaaa

SEQ ID NO: 2363 - RNA, 19 nt, Artificial Sequence
  Synthetic oligonucleotide
uuuaaccaucuccccagag

SEQ ID NO: 2364 - RNA, 19 nt, Artificial Sequence
  Synthetic oligonucleotide
cuggggagaugguuaaaua

SEQ ID NO: 2365 - RNA, 19 nt, Artificial Sequence
  Synthetic oligonucleotide
uauuuaaccaucuccccag

SEQ ID NO: 2366 - RNA, 19 nt, Artificial Sequence
  Synthetic oligonucleotide
uggggagaugguuaaauca

SEQ ID NO: 2367 - RNA, 19 nt, Artificial Sequence
  Synthetic oligonucleotide
ugauuuaaccaucucccca

SEQ ID NO: 2368 - RNA, 19 nt, Artificial Sequence
  Synthetic oligonucleotide
ggggagaugguuaaaucca

SEQ ID NO: 2369 - RNA, 19 nt, Artificial Sequence
  Synthetic oligonucleotide
uggauuuaaccaucucccc

SEQ ID NO: 2370 - RNA, 19 nt, Artificial Sequence
  Synthetic oligonucleotide
gggagaugguuaaauccaa

SEQ ID NO: 2371 - RNA, 19 nt, Artificial Sequence
  Synthetic oligonucleotide
uuggauuuaaccaucuccc

SEQ ID NO: 2372 - RNA, 19 nt, Artificial Sequence
  Synthetic oligonucleotide
ggagaugguuaaauccaca

SEQ ID NO: 2373 - RNA, 19 nt, Artificial Sequence
  Synthetic oligonucleotide
uguggauuuaaccaucucc

SEQ ID NO: 2374 - RNA, 19 nt, Artificial Sequence
  Synthetic oligonucleotide
ugguuaaauccacaacaaa

SEQ ID NO: 2375 - RNA, 19 nt, Artificial Sequence
  Synthetic oligonucleotide
uuuguuguggauuuaacca

SEQ ID NO: 2376 - RNA, 19 nt, Artificial Sequence
  Synthetic oligonucleotide
gguuaaauccacaacaaga

SEQ ID NO: 2377 - RNA, 19 nt, Artificial Sequence
  Synthetic oligonucleotide
ucuuguuguggauuuaacc

SEQ ID NO: 2378 - RNA, 19 nt, Artificial Sequence
  Synthetic oligonucleotide
guuaaauccacaacaagua

SEQ ID NO: 2379 - RNA, 19 nt, Artificial Sequence
  Synthetic oligonucleotide
uacuuguuguggauuuaac

SEQ ID NO: 2380 - RNA, 19 nt, Artificial Sequence
  Synthetic oligonucleotide
uaaauccacaacaagucua

SEQ ID NO: 2381 - RNA, 19 nt, Artificial Sequence
  Synthetic oligonucleotide
uagacuuguuguggauuua

SEQ ID NO: 2382 - RNA, 19 nt, Artificial Sequence
  Synthetic oligonucleotide
auccacaacaagucugaca

SEQ ID NO: 2383 - RNA, 19 nt, Artificial Sequence
  Synthetic oligonucleotide
ugucagacuuguuguggau

SEQ ID NO: 2384 - RNA, 19 nt, Artificial Sequence
  Synthetic oligonucleotide
aagucugaccucgucuuca

SEQ ID NO: 2385 - RNA, 19 nt, Artificial Sequence
  Synthetic oligonucleotide
ugaagacgaggucagacuu

SEQ ID NO: 2386 - RNA, 19 nt, Artificial Sequence
  Synthetic oligonucleotide
agucugaccucgucuucua

SEQ ID NO: 2387 - RNA, 19 nt, Artificial Sequence
  Synthetic oligonucleotide
uagaagacgaggucagacu

SEQ ID NO: 2388 - RNA, 19 nt, Artificial Sequence
  Synthetic oligonucleotide
ucugaccucgucuucuaca

SEQ ID NO: 2389 - RNA, 19 nt, Artificial Sequence
  Synthetic oligonucleotide
uguagaagacgaggucaga

SEQ ID NO: 2390 - RNA, 19 nt, Artificial Sequence
  Synthetic oligonucleotide
cugaccucgucuucuacua

SEQ ID NO: 2391 - RNA, 19 nt, Artificial Sequence
  Synthetic oligonucleotide
uaguagaagacgaggucag

SEQ ID NO: 2392 - RNA, 19 nt, Artificial Sequence
  Synthetic oligonucleotide
ugaccucgucuucuacuua

SEQ ID NO: 2393 - RNA, 19 nt, Artificial Sequence
  Synthetic oligonucleotide
uaaguagaagacgagguca

SEQ ID NO: 2394 - RNA, 19 nt, Artificial Sequence
  Synthetic oligonucleotide
ucuacuucuggaaguagua

SEQ ID NO: 2395 - RNA, 19 nt, Artificial Sequence
  Synthetic oligonucleotide
uacuacuuccagaaguaga

SEQ ID NO: 2396 - RNA, 19 nt, Artificial Sequence
  Synthetic oligonucleotide
cuacuucuggaaguaguga

SEQ ID NO: 2397 - RNA, 19 nt, Artificial Sequence
  Synthetic oligonucleotide
ucacuacuuccagaaguag

SEQ ID NO: 2398 - RNA, 19 nt, Artificial Sequence
  Synthetic oligonucleotide
uacuucuggaaguagugaa

SEQ ID NO: 2399 - RNA, 19 nt, Artificial Sequence
  Synthetic oligonucleotide
uucacuacuuccagaagua

SEQ ID NO: 2400 - RNA, 19 nt, Artificial Sequence
  Synthetic oligonucleotide
ucuggaaguagugauaaga

SEQ ID NO: 2401 - RNA, 19 nt, Artificial Sequence
  Synthetic oligonucleotide
ucuuaucacuacuuccaga

SEQ ID NO: 2402 - RNA, 19 nt, Artificial Sequence
  Synthetic oligonucleotide
cuggaaguagugauaagga

SEQ ID NO: 2403 - RNA, 19 nt, Artificial Sequence
  Synthetic oligonucleotide
uccuuaucacuacuuccag

SEQ ID NO: 2404 - RNA, 19 nt, Artificial Sequence
  Synthetic oligonucleotide
uggaaguagugauaaggua

SEQ ID NO: 2405 - RNA, 19 nt, Artificial Sequence
  Synthetic oligonucleotide
uaccuuaucacuacuucca

SEQ ID NO: 2406 - RNA, 19 nt, Artificial Sequence
  Synthetic oligonucleotide
ggaaguagugauaagguca

SEQ ID NO: 2407 - RNA, 19 nt, Artificial Sequence
  Synthetic oligonucleotide
ugaccuuaucacuacuucc

SEQ ID NO: 2408 - RNA, 19 nt, Artificial Sequence
  Synthetic oligonucleotide
gaaguagugauaaggucua

SEQ ID NO: 2409 - RNA, 19 nt, Artificial Sequence
  Synthetic oligonucleotide
uagaccuuaucacuacuuc

SEQ ID NO: 2410 - RNA, 19 nt, Artificial Sequence
  Synthetic oligonucleotide
aaguagugauaaggucuaa

SEQ ID NO: 2411 - RNA, 19 nt, Artificial Sequence
  Synthetic oligonucleotide
uuagaccuuaucacuacuu

SEQ ID NO: 2412 - RNA, 19 nt, Artificial Sequence
  Synthetic oligonucleotide
aguagugauaaggucuaua

SEQ ID NO: 2413 - RNA, 19 nt, Artificial Sequence
  Synthetic oligonucleotide
uauagaccuuaucacuacu

SEQ ID NO: 2414 - RNA, 19 nt, Artificial Sequence
  Synthetic oligonucleotide
guagugauaaggucuauga

SEQ ID NO: 2415 - RNA, 19 nt, Artificial Sequence
  Synthetic oligonucleotide
ucauagaccuuaucacuac

SEQ ID NO: 2416 - RNA, 19 nt, Artificial Sequence
  Synthetic oligonucleotide
uagugauaaggucuaugca

SEQ ID NO: 2417 - RNA, 19 nt, Artificial Sequence
  Synthetic oligonucleotide
ugcauagaccuuaucacua

SEQ ID NO: 2418 - RNA, 19 nt, Artificial Sequence
  Synthetic oligonucleotide
ugauaaggucuaugcccaa

SEQ ID NO: 2419 - RNA, 19 nt, Artificial Sequence
  Synthetic oligonucleotide
uugggcauagaccuuauca

SEQ ID NO: 2420 - RNA, 19 nt, Artificial Sequence
  Synthetic oligonucleotide
ggucuaugcccaccagaua

SEQ ID NO: 2421 - RNA, 19 nt, Artificial Sequence
  Synthetic oligonucleotide
uaucuggugggcauagacc

SEQ ID NO: 2422 - RNA, 19 nt, Artificial Sequence
  Synthetic oligonucleotide
gucuaugcccaccagauga

SEQ ID NO: 2423 - RNA, 19 nt, Artificial Sequence
  Synthetic oligonucleotide
ucaucuggugggcauagac

SEQ ID NO: 2424 - RNA, 19 nt, Artificial Sequence
  Synthetic oligonucleotide
cuaugcccaccagauggua

SEQ ID NO: 2425 - RNA, 19 nt, Artificial Sequence
  Synthetic oligonucleotide
uaccaucuggugggcauag

SEQ ID NO: 2426 - RNA, 19 nt, Artificial Sequence
  Synthetic oligonucleotide
uaugcccaccagaugguua

SEQ ID NO: 2427 - RNA, 19 nt, Artificial Sequence
  Synthetic oligonucleotide
uaaccaucuggugggcaua

SEQ ID NO: 2428 - RNA, 19 nt, Artificial Sequence
  Synthetic oligonucleotide
ugcccaccagaugguucga

SEQ ID NO: 2429 - RNA, 19 nt, Artificial Sequence
  Synthetic oligonucleotide
ucgaaccaucuggugggca

SEQ ID NO: 2430 - RNA, 19 nt, Artificial Sequence
  Synthetic oligonucleotide
gcccaccagaugguucgua

SEQ ID NO: 2431 - RNA, 19 nt, Artificial Sequence
  Synthetic oligonucleotide
uacgaaccaucuggugggc

SEQ ID NO: 2432 - RNA, 19 nt, Artificial Sequence
  Synthetic oligonucleotide
cccaccagaugguucguaa

SEQ ID NO: 2433 - RNA, 19 nt, Artificial Sequence
  Synthetic oligonucleotide
uuacgaaccaucugguggg

SEQ ID NO: 2434 - RNA, 19 nt, Artificial Sequence
  Synthetic oligonucleotide
ccaccagaugguucguaca

SEQ ID NO: 2435 - RNA, 19 nt, Artificial Sequence
  Synthetic oligonucleotide
uguacgaaccaucuggugg

SEQ ID NO: 2436 - RNA, 19 nt, Artificial Sequence
  Synthetic oligonucleotide
ccagaugguucguacagaa

SEQ ID NO: 2437 - RNA, 19 nt, Artificial Sequence
  Synthetic oligonucleotide
uucuguacgaaccaucugg

SEQ ID NO: 2438 - RNA, 19 nt, Artificial Sequence
  Synthetic oligonucleotide
ugguucguacagauuccca

SEQ ID NO: 2439 - RNA, 19 nt, Artificial Sequence
  Synthetic oligonucleotide
ugggaaucuguacgaacca

SEQ ID NO: 2440 - RNA, 19 nt, Artificial Sequence
  Synthetic oligonucleotide
cagauucccgggaacagaa

SEQ ID NO: 2441 - RNA, 19 nt, Artificial Sequence
  Synthetic oligonucleotide
uucuguucccgggaaucug

SEQ ID NO: 2442 - RNA, 19 nt, Artificial Sequence
  Synthetic oligonucleotide
agauucccgggaacagaaa

SEQ ID NO: 2443 - RNA, 19 nt, Artificial Sequence
  Synthetic oligonucleotide
uuucuguucccgggaaucu

SEQ ID NO: 2444 - RNA, 19 nt, Artificial Sequence
  Synthetic oligonucleotide
auucccgggaacagaagca

SEQ ID NO: 2445 - RNA, 19 nt, Artificial Sequence
  Synthetic oligonucleotide
ugcuucuguucccgggaau

SEQ ID NO: 2446 - RNA, 19 nt, Artificial Sequence
  Synthetic oligonucleotide
uucccgggaacagaagcua

SEQ ID NO: 2447 - RNA, 19 nt, Artificial Sequence
  Synthetic oligonucleotide
uagcuucuguucccgggaa

SEQ ID NO: 2448 - RNA, 19 nt, Artificial Sequence
  Synthetic oligonucleotide
cccgggaacagaagcuuga

SEQ ID NO: 2449 - RNA, 19 nt, Artificial Sequence
  Synthetic oligonucleotide
ucaagcuucuguucccggg

SEQ ID NO: 2450 - RNA, 19 nt, Artificial Sequence
  Synthetic oligonucleotide
ccgggaacagaagcuugaa

SEQ ID NO: 2451 - RNA, 19 nt, Artificial Sequence
  Synthetic oligonucleotide
uucaagcuucuguucccgg

SEQ ID NO: 2452 - RNA, 19 nt, Artificial Sequence
  Synthetic oligonucleotide
cgggaacagaagcuugaua

SEQ ID NO: 2453 - RNA, 19 nt, Artificial Sequence
  Synthetic oligonucleotide
uaucaagcuucuguucccg

SEQ ID NO: 2454 - RNA, 19 nt, Artificial Sequence
  Synthetic oligonucleotide
ggaacagaagcuugaugca

SEQ ID NO: 2455 - RNA, 19 nt, Artificial Sequence
  Synthetic oligonucleotide
ugcaucaagcuucuguucc

SEQ ID NO: 2456 - RNA, 19 nt, Artificial Sequence
  Synthetic oligonucleotide
acagaagcuugaugcauua

SEQ ID NO: 2457 - RNA, 19 nt, Artificial Sequence
  Synthetic oligonucleotide
uaaugcaucaagcuucugu

SEQ ID NO: 2458 - RNA, 19 nt, Artificial Sequence
  Synthetic oligonucleotide
agaagcuugaugcauuuca

SEQ ID NO: 2459 - RNA, 19 nt, Artificial Sequence
  Synthetic oligonucleotide
ugaaaugcaucaagcuucu

SEQ ID NO: 2460 - RNA, 19 nt, Artificial Sequence
  Synthetic oligonucleotide
gaagcuugaugcauuucua

SEQ ID NO: 2461 - RNA, 19 nt, Artificial Sequence
  Synthetic oligonucleotide
uagaaaugcaucaagcuuc

SEQ ID NO: 2462 - RNA, 19 nt, Artificial Sequence
  Synthetic oligonucleotide
gcuugaugcauuucugcaa

SEQ ID NO: 2463 - RNA, 19 nt, Artificial Sequence
  Synthetic oligonucleotide
uugcagaaaugcaucaagc

SEQ ID NO: 2464 - RNA, 19 nt, Artificial Sequence
  Synthetic oligonucleotide
gcagccucugagcaaacca

SEQ ID NO: 2465 - RNA, 19 nt, Artificial Sequence
  Synthetic oligonucleotide
ugguuugcucagaggcugc

SEQ ID NO: 2466 - RNA, 19 nt, Artificial Sequence
  Synthetic oligonucleotide
agcaaaccccuguccagua

SEQ ID NO: 2467 - RNA, 19 nt, Artificial Sequence
  Synthetic oligonucleotide
uacuggacagggguuugcu

SEQ ID NO: 2468 - RNA, 19 nt, Artificial Sequence
  Synthetic oligonucleotide
agccccaggccauugucaa

SEQ ID NO: 2469 - RNA, 19 nt, Artificial Sequence
  Synthetic oligonucleotide
uugacaauggccuggggcu

SEQ ID NO: 2470 - RNA, 19 nt, Artificial Sequence
  Synthetic oligonucleotide
ccccaggccauugucacaa

SEQ ID NO: 2471 - RNA, 19 nt, Artificial Sequence
  Synthetic oligonucleotide
uugugacaauggccugggg

SEQ ID NO: 2472 - RNA, 19 nt, Artificial Sequence
  Synthetic oligonucleotide
cccaggccauugucacaga

SEQ ID NO: 2473 - RNA, 19 nt, Artificial Sequence
  Synthetic oligonucleotide
ucugugacaauggccuggg

SEQ ID NO: 2474 - RNA, 19 nt, Artificial Sequence
  Synthetic oligonucleotide
ggccauugucacagaggaa

SEQ ID NO: 2475 - RNA, 19 nt, Artificial Sequence
  Synthetic oligonucleotide
uuccucugugacaauggcc

SEQ ID NO: 2476 - RNA, 19 nt, Artificial Sequence
  Synthetic oligonucleotide
ccauugucacagaggauaa

SEQ ID NO: 2477 - RNA, 19 nt, Artificial Sequence
  Synthetic oligonucleotide
uuauccucugugacaaugg

SEQ ID NO: 2478 - RNA, 19 nt, Artificial Sequence
  Synthetic oligonucleotide
cauugucacagaggauaaa

SEQ ID NO: 2479 - RNA, 19 nt, Artificial Sequence
  Synthetic oligonucleotide
uuuauccucugugacaaug

SEQ ID NO: 2480 - RNA, 19 nt, Artificial Sequence
  Synthetic oligonucleotide
uugucacagaggauaagaa

SEQ ID NO: 2481 - RNA, 19 nt, Artificial Sequence
  Synthetic oligonucleotide
uucuuauccucugugacaa

SEQ ID NO: 2482 - RNA, 19 nt, Artificial Sequence
  Synthetic oligonucleotide
ugucacagaggauaagaca

SEQ ID NO: 2483 - RNA, 19 nt, Artificial Sequence
  Synthetic oligonucleotide
ugucuuauccucugugaca

SEQ ID NO: 2484 - RNA, 19 nt, Artificial Sequence
  Synthetic oligonucleotide
cacagaggauaagacagaa

SEQ ID NO: 2485 - RNA, 19 nt, Artificial Sequence
  Synthetic oligonucleotide
uucugucuuauccucugug

SEQ ID NO: 2486 - RNA, 19 nt, Artificial Sequence
  Synthetic oligonucleotide
agaggauaagacagauaua

SEQ ID NO: 2487 - RNA, 19 nt, Artificial Sequence
  Synthetic oligonucleotide
uauaucugucuuauccucu

SEQ ID NO: 2488 - RNA, 19 nt, Artificial Sequence
  Synthetic oligonucleotide
gaggauaagacagauauua

SEQ ID NO: 2489 - RNA, 19 nt, Artificial Sequence
  Synthetic oligonucleotide
uaauaucugucuuauccuc

SEQ ID NO: 2490 - RNA, 19 nt, Artificial Sequence
  Synthetic oligonucleotide
gauaagacagauauuucua

SEQ ID NO: 2491 - RNA, 19 nt, Artificial Sequence
  Synthetic oligonucleotide
uagaaauaucugucuuauc

SEQ ID NO: 2492 - RNA, 19 nt, Artificial Sequence
  Synthetic oligonucleotide
auaagacagauauuucuaa

SEQ ID NO: 2493 - RNA, 19 nt, Artificial Sequence
  Synthetic oligonucleotide
uuagaaauaucugucuuau

SEQ ID NO: 2494 - RNA, 19 nt, Artificial Sequence
  Synthetic oligonucleotide
gacagauauuucuagugga

SEQ ID NO: 2495 - RNA, 19 nt, Artificial Sequence
  Synthetic oligonucleotide
uccacuagaaauaucuguc

SEQ ID NO: 2496 - RNA, 19 nt, Artificial Sequence
  Synthetic oligonucleotide
agggcuaggcagcaagaua

SEQ ID NO: 2497 - RNA, 19 nt, Artificial Sequence
  Synthetic oligonucleotide
uaucuugcugccuagcccu

SEQ ID NO: 2498 - RNA, 19 nt, Artificial Sequence
  Synthetic oligonucleotide
gggcuaggcagcaagauga

SEQ ID NO: 2499 - RNA, 19 nt, Artificial Sequence
  Synthetic oligonucleotide
ucaucuugcugccuagccc

SEQ ID NO: 2500 - RNA, 19 nt, Artificial Sequence
  Synthetic oligonucleotide
ggcuaggcagcaagaugaa

SEQ ID NO: 2501 - RNA, 19 nt, Artificial Sequence
  Synthetic oligonucleotide
uucaucuugcugccuagcc

SEQ ID NO: 2502 - RNA, 19 nt, Artificial Sequence
  Synthetic oligonucleotide
cuaggcagcaagaugagga

SEQ ID NO: 2503 - RNA, 19 nt, Artificial Sequence
  Synthetic oligonucleotide
uccucaucuugcugccuag

SEQ ID NO: 2504 - RNA, 19 nt, Artificial Sequence
  Synthetic oligonucleotide
uaggcagcaagaugaggaa

SEQ ID NO: 2505 - RNA, 19 nt, Artificial Sequence
  Synthetic oligonucleotide
uuccucaucuugcugccua

SEQ ID NO: 2506 - RNA, 19 nt, Artificial Sequence
  Synthetic oligonucleotide
gcaagaugaggagaugcua

SEQ ID NO: 2507 - RNA, 19 nt, Artificial Sequence
  Synthetic oligonucleotide
uagcaucuccucaucuugc

SEQ ID NO: 2508 - RNA, 19 nt, Artificial Sequence
  Synthetic oligonucleotide
caagaugaggagaugcuua

SEQ ID NO: 2509 - RNA, 19 nt, Artificial Sequence
  Synthetic oligonucleotide
uaagcaucuccucaucuug

SEQ ID NO: 2510 - RNA, 19 nt, Artificial Sequence
  Synthetic oligonucleotide
ugaggagaugcuugaacua

SEQ ID NO: 2511 - RNA, 19 nt, Artificial Sequence
  Synthetic oligonucleotide
uaguucaagcaucuccuca

SEQ ID NO: 2512 - RNA, 19 nt, Artificial Sequence
  Synthetic oligonucleotide
gggauacaacaaaggggaa

SEQ ID NO: 2513 - RNA, 19 nt, Artificial Sequence
  Synthetic oligonucleotide
uuccccuuuguuguauccc

SEQ ID NO: 2514 - RNA, 19 nt, Artificial Sequence
  Synthetic oligonucleotide
acaacaaaggggacuucaa

SEQ ID NO: 2515 - RNA, 19 nt, Artificial Sequence
  Synthetic oligonucleotide
uugaaguccccuuuguugu

SEQ ID NO: 2516 - RNA, 19 nt, Artificial Sequence
  Synthetic oligonucleotide
acaaaggggacuucagaaa

SEQ ID NO: 2517 - RNA, 19 nt, Artificial Sequence
  Synthetic oligonucleotide
uuucugaaguccccuuugu

SEQ ID NO: 2518 - RNA, 19 nt, Artificial Sequence
  Synthetic oligonucleotide
caaaggggacuucagaaaa

SEQ ID NO: 2519 - RNA, 19 nt, Artificial Sequence
  Synthetic oligonucleotide
uuuucugaaguccccuuug

SEQ ID NO: 2520 - RNA, 19 nt, Artificial Sequence
  Synthetic oligonucleotide
aaaggggacuucagaaaua

SEQ ID NO: 2521 - RNA, 19 nt, Artificial Sequence
  Synthetic oligonucleotide
uauuucugaaguccccuuu

SEQ ID NO: 2522 - RNA, 19 nt, Artificial Sequence
  Synthetic oligonucleotide
aaggggacuucagaaauga

SEQ ID NO: 2523 - RNA, 19 nt, Artificial Sequence
  Synthetic oligonucleotide
ucauuucugaaguccccuu

SEQ ID NO: 2524 - RNA, 19 nt, Artificial Sequence
  Synthetic oligonucleotide
ggggacuucagaaauguca

SEQ ID NO: 2525 - RNA, 19 nt, Artificial Sequence
  Synthetic oligonucleotide
ugacauuucugaagucccc

SEQ ID NO: 2526 - RNA, 19 nt, Artificial Sequence
  Synthetic oligonucleotide
gaagagaggaccuacuuca

SEQ ID NO: 2527 - RNA, 19 nt, Artificial Sequence
  Synthetic oligonucleotide
ugaaguagguccucucuuc

SEQ ID NO: 2528 - RNA, 19 nt, Artificial Sequence
  Synthetic oligonucleotide
aagagaggaccuacuucca

SEQ ID NO: 2529 - RNA, 19 nt, Artificial Sequence
  Synthetic oligonucleotide
uggaaguagguccucucuu

SEQ ID NO: 2530 - RNA, 19 nt, Artificial Sequence
  Synthetic oligonucleotide
agagaggaccuacuuccaa

SEQ ID NO: 2531 - RNA, 19 nt, Artificial Sequence
  Synthetic oligonucleotide
uuggaaguagguccucucu

SEQ ID NO: 2532 - RNA, 19 nt, Artificial Sequence
  Synthetic oligonucleotide
gagaggaccuacuuccaga

SEQ ID NO: 2533 - RNA, 19 nt, Artificial Sequence
  Synthetic oligonucleotide
ucuggaaguagguccucuc

SEQ ID NO: 2534 - RNA, 19 nt, Artificial Sequence
  Synthetic oligonucleotide
aggaccuacuuccagcaaa

SEQ ID NO: 2535 - RNA, 19 nt, Artificial Sequence
  Synthetic oligonucleotide
uuugcuggaaguagguccu

SEQ ID NO: 2536 - RNA, 19 nt, Artificial Sequence
  Synthetic oligonucleotide
caaccccagaaagagacaa

SEQ ID NO: 2537 - RNA, 19 nt, Artificial Sequence
  Synthetic oligonucleotide
uugucucuuucugggguug

SEQ ID NO: 2538 - RNA, 19 nt, Artificial Sequence
  Synthetic oligonucleotide
accccagaaagagacauca

SEQ ID NO: 2539 - RNA, 19 nt, Artificial Sequence
  Synthetic oligonucleotide
ugaugucucuuucuggggu

SEQ ID NO: 2540 - RNA, 19 nt, Artificial Sequence
  Synthetic oligonucleotide
ccccagaaagagacaucga

SEQ ID NO: 2541 - RNA, 19 nt, Artificial Sequence
  Synthetic oligonucleotide
ucgaugucucuuucugggg

SEQ ID NO: 2542 - RNA, 19 nt, Artificial Sequence
  Synthetic oligonucleotide
agaaagagacaucgggaaa

SEQ ID NO: 2543 - RNA, 19 nt, Artificial Sequence
  Synthetic oligonucleotide
uuucccgaugucucuuucu

SEQ ID NO: 2544 - RNA, 19 nt, Artificial Sequence
  Synthetic oligonucleotide
acaucgggaagauucugaa

SEQ ID NO: 2545 - RNA, 19 nt, Artificial Sequence
  Synthetic oligonucleotide
uucagaaucuucccgaugu

SEQ ID NO: 2546 - RNA, 19 nt, Artificial Sequence
  Synthetic oligonucleotide
caucgggaagauucugaua

SEQ ID NO: 2547 - RNA, 19 nt, Artificial Sequence
  Synthetic oligonucleotide
uaucagaaucuucccgaug

SEQ ID NO: 2548 - RNA, 19 nt, Artificial Sequence
  Synthetic oligonucleotide
aucgggaagauucugauga

SEQ ID NO: 2549 - RNA, 19 nt, Artificial Sequence
  Synthetic oligonucleotide
ucaucagaaucuucccgau

SEQ ID NO: 2550 - RNA, 19 nt, Artificial Sequence
  Synthetic oligonucleotide
cgggaagauucugauguga

SEQ ID NO: 2551 - RNA, 19 nt, Artificial Sequence
  Synthetic oligonucleotide
ucacaucagaaucuucccg

SEQ ID NO: 2552 - RNA, 19 nt, Artificial Sequence
  Synthetic oligonucleotide
gggaagauucugaugugga

SEQ ID NO: 2553 - RNA, 19 nt, Artificial Sequence
  Synthetic oligonucleotide
uccacaucagaaucuuccc

SEQ ID NO: 2554 - RNA, 19 nt, Artificial Sequence
  Synthetic oligonucleotide
ggaagauucugauguggaa

SEQ ID NO: 2555 - RNA, 19 nt, Artificial Sequence
  Synthetic oligonucleotide
uuccacaucagaaucuucc

SEQ ID NO: 2556 - RNA, 19 nt, Artificial Sequence
  Synthetic oligonucleotide
gaagauucugauguggaaa

SEQ ID NO: 2557 - RNA, 19 nt, Artificial Sequence
  Synthetic oligonucleotide
uuuccacaucagaaucuuc

SEQ ID NO: 2558 - RNA, 19 nt, Artificial Sequence
  Synthetic oligonucleotide
agauucugauguggaaaua

SEQ ID NO: 2559 - RNA, 19 nt, Artificial Sequence
  Synthetic oligonucleotide
uauuuccacaucagaaucu

SEQ ID NO: 2560 - RNA, 19 nt, Artificial Sequence
  Synthetic oligonucleotide
ugauguggaaaugguggaa

SEQ ID NO: 2561 - RNA, 19 nt, Artificial Sequence
  Synthetic oligonucleotide
uuccaccauuuccacauca

SEQ ID NO: 2562 - RNA, 19 nt, Artificial Sequence
  Synthetic oligonucleotide
gaaaugguggaagaugaua

SEQ ID NO: 2563 - RNA, 19 nt, Artificial Sequence
  Synthetic oligonucleotide
uaucaucuuccaccauuuc

SEQ ID NO: 2564 - RNA, 19 nt, Artificial Sequence
  Synthetic oligonucleotide
aaaugguggaagaugauua

SEQ ID NO: 2565 - RNA, 19 nt, Artificial Sequence
  Synthetic oligonucleotide
uaaucaucuuccaccauuu

SEQ ID NO: 2566 - RNA, 19 nt, Artificial Sequence
  Synthetic oligonucleotide
aaugguggaagaugauuca

SEQ ID NO: 2567 - RNA, 19 nt, Artificial Sequence
  Synthetic oligonucleotide
ugaaucaucuuccaccauu

SEQ ID NO: 2568 - RNA, 19 nt, Artificial Sequence
  Synthetic oligonucleotide
augguggaagaugauucca

SEQ ID NO: 2569 - RNA, 19 nt, Artificial Sequence
  Synthetic oligonucleotide
uggaaucaucuuccaccau

SEQ ID NO: 2570 - RNA, 19 nt, Artificial Sequence
  Synthetic oligonucleotide
guggaagaugauucccgaa

SEQ ID NO: 2571 - RNA, 19 nt, Artificial Sequence
  Synthetic oligonucleotide
uucgggaaucaucuuccac

SEQ ID NO: 2572 - RNA, 19 nt, Artificial Sequence
  Synthetic oligonucleotide
ggaagaugauucccgaaaa

SEQ ID NO: 2573 - RNA, 19 nt, Artificial Sequence
  Synthetic oligonucleotide
uuuucgggaaucaucuucc

SEQ ID NO: 2574 - RNA, 19 nt, Artificial Sequence
  Synthetic oligonucleotide
agaugauucccgaaaggaa

SEQ ID NO: 2575 - RNA, 19 nt, Artificial Sequence
  Synthetic oligonucleotide
uuccuuucgggaaucaucu

SEQ ID NO: 2576 - RNA, 19 nt, Artificial Sequence
  Synthetic oligonucleotide
augauucccgaaaggaaaa

SEQ ID NO: 2577 - RNA, 19 nt, Artificial Sequence
  Synthetic oligonucleotide
uuuuccuuucgggaaucau

SEQ ID NO: 2578 - RNA, 19 nt, Artificial Sequence
  Synthetic oligonucleotide
ucccgaaaggaaaugacua

SEQ ID NO: 2579 - RNA, 19 nt, Artificial Sequence
  Synthetic oligonucleotide
uagucauuuccuuucggga

SEQ ID NO: 2580 - RNA, 19 nt, Artificial Sequence
  Synthetic oligonucleotide
cccgaaaggaaaugacuga

SEQ ID NO: 2581 - RNA, 19 nt, Artificial Sequence
  Synthetic oligonucleotide
ucagucauuuccuuucggg

SEQ ID NO: 2582 - RNA, 19 nt, Artificial Sequence
  Synthetic oligonucleotide
ccgaaaggaaaugacugca

SEQ ID NO: 2583 - RNA, 19 nt, Artificial Sequence
  Synthetic oligonucleotide
ugcagucauuuccuuucgg

SEQ ID NO: 2584 - RNA, 19 nt, Artificial Sequence
  Synthetic oligonucleotide
cgaaaggaaaugacugcaa

SEQ ID NO: 2585 - RNA, 19 nt, Artificial Sequence
  Synthetic oligonucleotide
uugcagucauuuccuuucg

SEQ ID NO: 2586 - RNA, 19 nt, Artificial Sequence
  Synthetic oligonucleotide
aaugacugcagcuuguaca

SEQ ID NO: 2587 - RNA, 19 nt, Artificial Sequence
  Synthetic oligonucleotide
uguacaagcugcagucauu

SEQ ID NO: 2588 - RNA, 19 nt, Artificial Sequence
  Synthetic oligonucleotide
augacugcagcuuguacca

SEQ ID NO: 2589 - RNA, 19 nt, Artificial Sequence
  Synthetic oligonucleotide
ugguacaagcugcagucau

SEQ ID NO: 2590 - RNA, 19 nt, Artificial Sequence
  Synthetic oligonucleotide
ugacugcagcuuguaccca

SEQ ID NO: 2591 - RNA, 19 nt, Artificial Sequence
  Synthetic oligonucleotide
uggguacaagcugcaguca

SEQ ID NO: 2592 - RNA, 19 nt, Artificial Sequence
  Synthetic oligonucleotide
ccccggagaaggaucauua

SEQ ID NO: 2593 - RNA, 19 nt, Artificial Sequence
  Synthetic oligonucleotide
uaaugauccuucuccgggg

SEQ ID NO: 2594 - RNA, 19 nt, Artificial Sequence
  Synthetic oligonucleotide
ccggagaaggaucauuaaa

SEQ ID NO: 2595 - RNA, 19 nt, Artificial Sequence
  Synthetic oligonucleotide
uuuaaugauccuucuccgg

SEQ ID NO: 2596 - RNA, 19 nt, Artificial Sequence
  Synthetic oligonucleotide
ggagaaggaucauuaacca

SEQ ID NO: 2597 - RNA, 19 nt, Artificial Sequence
  Synthetic oligonucleotide
ugguuaaugauccuucucc

SEQ ID NO: 2598 - RNA, 19 nt, Artificial Sequence
  Synthetic oligonucleotide
gagaaggaucauuaaccua

SEQ ID NO: 2599 - RNA, 19 nt, Artificial Sequence
  Synthetic oligonucleotide
uagguuaaugauccuucuc

SEQ ID NO: 2600 - RNA, 19 nt, Artificial Sequence
  Synthetic oligonucleotide
agaaggaucauuaaccuca

SEQ ID NO: 2601 - RNA, 19 nt, Artificial Sequence
  Synthetic oligonucleotide
ugagguuaaugauccuucu

SEQ ID NO: 2602 - RNA, 19 nt, Artificial Sequence
  Synthetic oligonucleotide
gaaggaucauuaaccucaa

SEQ ID NO: 2603 - RNA, 19 nt, Artificial Sequence
  Synthetic oligonucleotide
uugagguuaaugauccuuc

SEQ ID NO: 2604 - RNA, 19 nt, Artificial Sequence
  Synthetic oligonucleotide
aaggaucauuaaccucaca

SEQ ID NO: 2605 - RNA, 19 nt, Artificial Sequence
  Synthetic oligonucleotide
ugugagguuaaugauccuu

SEQ ID NO: 2606 - RNA, 19 nt, Artificial Sequence
  Synthetic oligonucleotide
aggaucauuaaccucacua

SEQ ID NO: 2607 - RNA, 19 nt, Artificial Sequence
  Synthetic oligonucleotide
uagugagguuaaugauccu

SEQ ID NO: 2608 - RNA, 19 nt, Artificial Sequence
  Synthetic oligonucleotide
aucauuaaccucacuagua

SEQ ID NO: 2609 - RNA, 19 nt, Artificial Sequence
  Synthetic oligonucleotide
uacuagugagguuaaugau

SEQ ID NO: 2610 - RNA, 19 nt, Artificial Sequence
  Synthetic oligonucleotide
ucauuaaccucacuaguga

SEQ ID NO: 2611 - RNA, 19 nt, Artificial Sequence
  Synthetic oligonucleotide
ucacuagugagguuaauga

SEQ ID NO: 2612 - RNA, 19 nt, Artificial Sequence
  Synthetic oligonucleotide
cauuaaccucacuagugua

SEQ ID NO: 2613 - RNA, 19 nt, Artificial Sequence
  Synthetic oligonucleotide
uacacuagugagguuaaug

SEQ ID NO: 2614 - RNA, 19 nt, Artificial Sequence
  Synthetic oligonucleotide
auuaaccucacuaguguua

SEQ ID NO: 2615 - RNA, 19 nt, Artificial Sequence
  Synthetic oligonucleotide
uaacacuagugagguuaau

SEQ ID NO: 2616 - RNA, 19 nt, Artificial Sequence
  Synthetic oligonucleotide
uuaaccucacuaguguuua

SEQ ID NO: 2617 - RNA, 19 nt, Artificial Sequence
  Synthetic oligonucleotide
uaaacacuagugagguuaa

SEQ ID NO: 2618 - RNA, 19 nt, Artificial Sequence
  Synthetic oligonucleotide
aaccucacuaguguuuuga

SEQ ID NO: 2619 - RNA, 19 nt, Artificial Sequence
  Synthetic oligonucleotide
ucaaaacacuagugagguu

SEQ ID NO: 2620 - RNA, 19 nt, Artificial Sequence
  Synthetic oligonucleotide
accucacuaguguuuugaa

SEQ ID NO: 2621 - RNA, 19 nt, Artificial Sequence
  Synthetic oligonucleotide
uucaaaacacuagugaggu

SEQ ID NO: 2622 - RNA, 19 nt, Artificial Sequence
  Synthetic oligonucleotide
ccucacuaguguuuugaga

SEQ ID NO: 2623 - RNA, 19 nt, Artificial Sequence
  Synthetic oligonucleotide
ucucaaaacacuagugagg

SEQ ID NO: 2624 - RNA, 19 nt, Artificial Sequence
  Synthetic oligonucleotide
cucacuaguguuuugagua

SEQ ID NO: 2625 - RNA, 19 nt, Artificial Sequence
  Synthetic oligonucleotide
uacucaaaacacuagugag

SEQ ID NO: 2626 - RNA, 19 nt, Artificial Sequence
  Synthetic oligonucleotide
ucacuaguguuuugaguca

SEQ ID NO: 2627 - RNA, 19 nt, Artificial Sequence
  Synthetic oligonucleotide
ugacucaaaacacuaguga

SEQ ID NO: 2628 - RNA, 19 nt, Artificial Sequence
  Synthetic oligonucleotide
cacuaguguuuugagucua

SEQ ID NO: 2629 - RNA, 19 nt, Artificial Sequence
  Synthetic oligonucleotide
uagacucaaaacacuagug

SEQ ID NO: 2630 - RNA, 19 nt, Artificial Sequence
  Synthetic oligonucleotide
acuaguguuuugagucuca

SEQ ID NO: 2631 - RNA, 19 nt, Artificial Sequence
  Synthetic oligonucleotide
ugagacucaaaacacuagu

SEQ ID NO: 2632 - RNA, 19 nt, Artificial Sequence
  Synthetic oligonucleotide
uaguguuuugagucuccaa

SEQ ID NO: 2633 - RNA, 19 nt, Artificial Sequence
  Synthetic oligonucleotide
uuggagacucaaaacacua

SEQ ID NO: 2634 - RNA, 19 nt, Artificial Sequence
  Synthetic oligonucleotide
guuuugagucuccaggaaa

SEQ ID NO: 2635 - RNA, 19 nt, Artificial Sequence
  Synthetic oligonucleotide
uuuccuggagacucaaaac

SEQ ID NO: 2636 - RNA, 19 nt, Artificial Sequence
  Synthetic oligonucleotide
auuaaugagcagggacaua

SEQ ID NO: 2637 - RNA, 19 nt, Artificial Sequence
  Synthetic oligonucleotide
uaugucccugcucauuaau

SEQ ID NO: 2638 - RNA, 19 nt, Artificial Sequence
  Synthetic oligonucleotide
uaaugagcagggacaugaa

SEQ ID NO: 2639 - RNA, 19 nt, Artificial Sequence
  Synthetic oligonucleotide
uucaugucccugcucauua

SEQ ID NO: 2640 - RNA, 19 nt, Artificial Sequence
  Synthetic oligonucleotide
aaugagcagggacaugaga

SEQ ID NO: 2641 - RNA, 19 nt, Artificial Sequence
  Synthetic oligonucleotide
ucucaugucccugcucauu

SEQ ID NO: 2642 - RNA, 19 nt, Artificial Sequence
  Synthetic oligonucleotide
ugagcagggacaugaggua

SEQ ID NO: 2643 - RNA, 19 nt, Artificial Sequence
  Synthetic oligonucleotide
uaccucaugucccugcuca

SEQ ID NO: 2644 - RNA, 19 nt, Artificial Sequence
  Synthetic oligonucleotide
gcagggacaugagguucua

SEQ ID NO: 2645 - RNA, 19 nt, Artificial Sequence
  Synthetic oligonucleotide
uagaaccucaugucccugc

SEQ ID NO: 2646 - RNA, 19 nt, Artificial Sequence
  Synthetic oligonucleotide
cagggacaugagguucuca

SEQ ID NO: 2647 - RNA, 19 nt, Artificial Sequence
  Synthetic oligonucleotide
ugagaaccucaugucccug

SEQ ID NO: 2648 - RNA, 19 nt, Artificial Sequence
  Synthetic oligonucleotide
agguucuccgggagaugua

SEQ ID NO: 2649 - RNA, 19 nt, Artificial Sequence
  Synthetic oligonucleotide
uacaucucccggagaaccu

SEQ ID NO: 2650 - RNA, 19 nt, Artificial Sequence
  Synthetic oligonucleotide
gguucuccgggagauguua

SEQ ID NO: 2651 - RNA, 19 nt, Artificial Sequence
  Synthetic oligonucleotide
uaacaucucccggagaacc

SEQ ID NO: 2652 - RNA, 19 nt, Artificial Sequence
  Synthetic oligonucleotide
guucuccgggagauguuga

SEQ ID NO: 2653 - RNA, 19 nt, Artificial Sequence
  Synthetic oligonucleotide
ucaacaucucccggagaac

SEQ ID NO: 2654 - RNA, 19 nt, Artificial Sequence
  Synthetic oligonucleotide
uucuccgggagauguugca

SEQ ID NO: 2655 - RNA, 19 nt, Artificial Sequence
  Synthetic oligonucleotide
ugcaacaucucccggagaa

SEQ ID NO: 2656 - RNA, 19 nt, Artificial Sequence
  Synthetic oligonucleotide
ucuccgggagauguugcaa

SEQ ID NO: 2657 - RNA, 19 nt, Artificial Sequence
  Synthetic oligonucleotide
uugcaacaucucccggaga

SEQ ID NO: 2658 - RNA, 19 nt, Artificial Sequence
  Synthetic oligonucleotide
cuccgggagauguugcaua

SEQ ID NO: 2659 - RNA, 19 nt, Artificial Sequence
  Synthetic oligonucleotide
uaugcaacaucucccggag

SEQ ID NO: 2660 - RNA, 19 nt, Artificial Sequence
  Synthetic oligonucleotide
uccgggagauguugcauaa

SEQ ID NO: 2661 - RNA, 19 nt, Artificial Sequence
  Synthetic oligonucleotide
uuaugcaacaucucccgga

SEQ ID NO: 2662 - RNA, 19 nt, Artificial Sequence
  Synthetic oligonucleotide
ccgggagauguugcauaaa

SEQ ID NO: 2663 - RNA, 19 nt, Artificial Sequence
  Synthetic oligonucleotide
uuuaugcaacaucucccgg

SEQ ID NO: 2664 - RNA, 19 nt, Artificial Sequence
  Synthetic oligonucleotide
ggagauguugcauaaccaa

SEQ ID NO: 2665 - RNA, 19 nt, Artificial Sequence
  Synthetic oligonucleotide
uugguuaugcaacaucucc

SEQ ID NO: 2666 - RNA, 19 nt, Artificial Sequence
  Synthetic oligonucleotide
ccuucgugggcugugugaa

SEQ ID NO: 2667 - RNA, 19 nt, Artificial Sequence
  Synthetic oligonucleotide
uucacacagcccacgaagg

SEQ ID NO: 2668 - RNA, 19 nt, Artificial Sequence
  Synthetic oligonucleotide
cuucgugggcugugugaaa

SEQ ID NO: 2669 - RNA, 19 nt, Artificial Sequence
  Synthetic oligonucleotide
uuucacacagcccacgaag

SEQ ID NO: 2670 - RNA, 19 nt, Artificial Sequence
  Synthetic oligonucleotide
uucgugggcugugugaaua

SEQ ID NO: 2671 - RNA, 19 nt, Artificial Sequence
  Synthetic oligonucleotide
uauucacacagcccacgaa

SEQ ID NO: 2672 - RNA, 19 nt, Artificial Sequence
  Synthetic oligonucleotide
ucgugggcugugugaauca

SEQ ID NO: 2673 - RNA, 19 nt, Artificial Sequence
  Synthetic oligonucleotide
ugauucacacagcccacga

SEQ ID NO: 2674 - RNA, 19 nt, Artificial Sequence
  Synthetic oligonucleotide
gugggcugugugaauccua

SEQ ID NO: 2675 - RNA, 19 nt, Artificial Sequence
  Synthetic oligonucleotide
uaggauucacacagcccac

SEQ ID NO: 2676 - RNA, 19 nt, Artificial Sequence
  Synthetic oligonucleotide
ugggcugugugaauccuca

SEQ ID NO: 2677 - RNA, 19 nt, Artificial Sequence
  Synthetic oligonucleotide
ugaggauucacacagccca

SEQ ID NO: 2678 - RNA, 19 nt, Artificial Sequence
  Synthetic oligonucleotide
gggcugugugaauccucaa

SEQ ID NO: 2679 - RNA, 19 nt, Artificial Sequence
  Synthetic oligonucleotide
uugaggauucacacagccc

SEQ ID NO: 2680 - RNA, 19 nt, Artificial Sequence
  Synthetic oligonucleotide
ucagugggccuuggcacaa

SEQ ID NO: 2681 - RNA, 19 nt, Artificial Sequence
  Synthetic oligonucleotide
uugugccaaggcccacuga

SEQ ID NO: 2682 - RNA, 19 nt, Artificial Sequence
  Synthetic oligonucleotide
gccuuggcacagcaucaaa

SEQ ID NO: 2683 - RNA, 19 nt, Artificial Sequence
  Synthetic oligonucleotide
uuugaugcugugccaaggc

SEQ ID NO: 2684 - RNA, 19 nt, Artificial Sequence
  Synthetic oligonucleotide
ccuuggcacagcaucaaaa

SEQ ID NO: 2685 - RNA, 19 nt, Artificial Sequence
  Synthetic oligonucleotide
uuuugaugcugugccaagg

SEQ ID NO: 2686 - RNA, 19 nt, Artificial Sequence
  Synthetic oligonucleotide
cuuggcacagcaucaaaca

SEQ ID NO: 2687 - RNA, 19 nt, Artificial Sequence
  Synthetic oligonucleotide
uguuugaugcugugccaag

SEQ ID NO: 2688 - RNA, 19 nt, Artificial Sequence
  Synthetic oligonucleotide
uuggcacagcaucaaacca

SEQ ID NO: 2689 - RNA, 19 nt, Artificial Sequence
  Synthetic oligonucleotide
ugguuugaugcugugccaa

SEQ ID NO: 2690 - RNA, 19 nt, Artificial Sequence
  Synthetic oligonucleotide
gcacagcaucaaaccaaga

SEQ ID NO: 2691 - RNA, 19 nt, Artificial Sequence
  Synthetic oligonucleotide
ucuugguuugaugcugugc

SEQ ID NO: 2692 - RNA, 19 nt, Artificial Sequence
  Synthetic oligonucleotide
agcaucaaaccaaguuaua

SEQ ID NO: 2693 - RNA, 19 nt, Artificial Sequence
  Synthetic oligonucleotide
uauaacuugguuugaugcu

SEQ ID NO: 2694 - RNA, 19 nt, Artificial Sequence
  Synthetic oligonucleotide
gcaucaaaccaaguuauaa

SEQ ID NO: 2695 - RNA, 19 nt, Artificial Sequence
  Synthetic oligonucleotide
uuauaacuugguuugaugc

SEQ ID NO: 2696 - RNA, 19 nt, Artificial Sequence
  Synthetic oligonucleotide
aucaaaccaaguuauacca

SEQ ID NO: 2697 - RNA, 19 nt, Artificial Sequence
  Synthetic oligonucleotide
ugguauaacuugguuugau

SEQ ID NO: 2698 - RNA, 19 nt, Artificial Sequence
  Synthetic oligonucleotide
ucaaaccaaguuauaccua

SEQ ID NO: 2699 - RNA, 19 nt, Artificial Sequence
  Synthetic oligonucleotide
uagguauaacuugguuuga

SEQ ID NO: 2700 - RNA, 19 nt, Artificial Sequence
  Synthetic oligonucleotide
aaaccaaguuauaccuuca

SEQ ID NO: 2701 - RNA, 19 nt, Artificial Sequence
  Synthetic oligonucleotide
ugaagguauaacuugguuu

SEQ ID NO: 2702 - RNA, 19 nt, Artificial Sequence
  Synthetic oligonucleotide
aaccaaguuauaccuucua

SEQ ID NO: 2703 - RNA, 19 nt, Artificial Sequence
  Synthetic oligonucleotide
uagaagguauaacuugguu

SEQ ID NO: 2704 - RNA, 19 nt, Artificial Sequence
  Synthetic oligonucleotide
aguuauaccuucucaacaa

SEQ ID NO: 2705 - RNA, 19 nt, Artificial Sequence
  Synthetic oligonucleotide
uuguugagaagguauaacu

SEQ ID NO: 2706 - RNA, 19 nt, Artificial Sequence
  Synthetic oligonucleotide
guuauaccuucucaacaca

SEQ ID NO: 2707 - RNA, 19 nt, Artificial Sequence
  Synthetic oligonucleotide
uguguugagaagguauaac

SEQ ID NO: 2708 - RNA, 19 nt, Artificial Sequence
  Synthetic oligonucleotide
uauaccuucucaacaccaa

SEQ ID NO: 2709 - RNA, 19 nt, Artificial Sequence
  Synthetic oligonucleotide
uugguguugagaagguaua

SEQ ID NO: 2710 - RNA, 19 nt, Artificial Sequence
  Synthetic oligonucleotide
ucucaacaccaccaagcua

SEQ ID NO: 2711 - RNA, 19 nt, Artificial Sequence
  Synthetic oligonucleotide
uagcuuggugguguugaga

SEQ ID NO: 2712 - RNA, 19 nt, Artificial Sequence
  Synthetic oligonucleotide
ucaacaccaccaagcuuaa

SEQ ID NO: 2713 - RNA, 19 nt, Artificial Sequence
  Synthetic oligonucleotide
uuaagcuuggugguguuga

SEQ ID NO: 2714 - RNA, 19 nt, Artificial Sequence
  Synthetic oligonucleotide
caacaccaccaagcuuaga

SEQ ID NO: 2715 - RNA, 19 nt, Artificial Sequence
  Synthetic oligonucleotide
ucuaagcuuggugguguug

SEQ ID NO: 2716 - RNA, 19 nt, Artificial Sequence
  Synthetic oligonucleotide
aacaccaccaagcuuagua

SEQ ID NO: 2717 - RNA, 19 nt, Artificial Sequence
  Synthetic oligonucleotide
uacuaagcuuggugguguu

SEQ ID NO: 2718 - RNA, 19 nt, Artificial Sequence
  Synthetic oligonucleotide
acaccaccaagcuuaguga

SEQ ID NO: 2719 - RNA, 19 nt, Artificial Sequence
  Synthetic oligonucleotide
ucacuaagcuugguggugu

SEQ ID NO: 2720 - RNA, 19 nt, Artificial Sequence
  Synthetic oligonucleotide
accaccaagcuuagugaaa

SEQ ID NO: 2721 - RNA, 19 nt, Artificial Sequence
  Synthetic oligonucleotide
uuucacuaagcuugguggu

SEQ ID NO: 2722 - RNA, 19 nt, Artificial Sequence
  Synthetic oligonucleotide
ccaccaagcuuagugaaga

SEQ ID NO: 2723 - RNA, 19 nt, Artificial Sequence
  Synthetic oligonucleotide
ucuucacuaagcuuggugg

SEQ ID NO: 2724 - RNA, 19 nt, Artificial Sequence
  Synthetic oligonucleotide
accaagcuuagugaagaaa

SEQ ID NO: 2725 - RNA, 19 nt, Artificial Sequence
  Synthetic oligonucleotide
uuucuucacuaagcuuggu

SEQ ID NO: 2726 - RNA, 19 nt, Artificial Sequence
  Synthetic oligonucleotide
ccaagcuuagugaagaaca

SEQ ID NO: 2727 - RNA, 19 nt, Artificial Sequence
  Synthetic oligonucleotide
uguucuucacuaagcuugg

SEQ ID NO: 2728 - RNA, 19 nt, Artificial Sequence
  Synthetic oligonucleotide
aagcuuagugaagaacuga

SEQ ID NO: 2729 - RNA, 19 nt, Artificial Sequence
  Synthetic oligonucleotide
ucaguucuucacuaagcuu

SEQ ID NO: 2730 - RNA, 19 nt, Artificial Sequence
  Synthetic oligonucleotide
agcuuagugaagaacugua

SEQ ID NO: 2731 - RNA, 19 nt, Artificial Sequence
  Synthetic oligonucleotide
uacaguucuucacuaagcu

SEQ ID NO: 2732 - RNA, 19 nt, Artificial Sequence
  Synthetic oligonucleotide
cuuagugaagaacuguuca

SEQ ID NO: 2733 - RNA, 19 nt, Artificial Sequence
  Synthetic oligonucleotide
ugaacaguucuucacuaag

SEQ ID NO: 2734 - RNA, 19 nt, Artificial Sequence
  Synthetic oligonucleotide
agugaagaacuguucuaca

SEQ ID NO: 2735 - RNA, 19 nt, Artificial Sequence
  Synthetic oligonucleotide
uguagaacaguucuucacu

SEQ ID NO: 2736 - RNA, 19 nt, Artificial Sequence
  Synthetic oligonucleotide
gaagaacuguucuaccaga

SEQ ID NO: 2737 - RNA, 19 nt, Artificial Sequence
  Synthetic oligonucleotide
ucugguagaacaguucuuc

SEQ ID NO: 2738 - RNA, 19 nt, Artificial Sequence
  Synthetic oligonucleotide
aagaacuguucuaccagaa

SEQ ID NO: 2739 - RNA, 19 nt, Artificial Sequence
  Synthetic oligonucleotide
uucugguagaacaguucuu

SEQ ID NO: 2740 - RNA, 19 nt, Artificial Sequence
  Synthetic oligonucleotide
agaacuguucuaccagaua

SEQ ID NO: 2741 - RNA, 19 nt, Artificial Sequence
  Synthetic oligonucleotide
uaucugguagaacaguucu

SEQ ID NO: 2742 - RNA, 19 nt, Artificial Sequence
  Synthetic oligonucleotide
aacuguucuaccagauaca

SEQ ID NO: 2743 - RNA, 19 nt, Artificial Sequence
  Synthetic oligonucleotide
uguaucugguagaacaguu

SEQ ID NO: 2744 - RNA, 19 nt, Artificial Sequence
  Synthetic oligonucleotide
acuguucuaccagauacua

SEQ ID NO: 2745 - RNA, 19 nt, Artificial Sequence
  Synthetic oligonucleotide
uaguaucugguagaacagu

SEQ ID NO: 2746 - RNA, 19 nt, Artificial Sequence
  Synthetic oligonucleotide
uguucuaccagauacucaa

SEQ ID NO: 2747 - RNA, 19 nt, Artificial Sequence
  Synthetic oligonucleotide
uugaguaucugguagaaca

SEQ ID NO: 2748 - RNA, 19 nt, Artificial Sequence
  Synthetic oligonucleotide
guucuaccagauacucaua

SEQ ID NO: 2749 - RNA, 19 nt, Artificial Sequence
  Synthetic oligonucleotide
uaugaguaucugguagaac

SEQ ID NO: 2750 - RNA, 19 nt, Artificial Sequence
  Synthetic oligonucleotide
ucuaccagauacucauuua

SEQ ID NO: 2751 - RNA, 19 nt, Artificial Sequence
  Synthetic oligonucleotide
uaaaugaguaucugguaga

SEQ ID NO: 2752 - RNA, 19 nt, Artificial Sequence
  Synthetic oligonucleotide
accagauacucauuuauga

SEQ ID NO: 2753 - RNA, 19 nt, Artificial Sequence
  Synthetic oligonucleotide
ucauaaaugaguaucuggu

SEQ ID NO: 2754 - RNA, 19 nt, Artificial Sequence
  Synthetic oligonucleotide
ccagauacucauuuaugaa

SEQ ID NO: 2755 - RNA, 19 nt, Artificial Sequence
  Synthetic oligonucleotide
uucauaaaugaguaucugg

SEQ ID NO: 2756 - RNA, 19 nt, Artificial Sequence
  Synthetic oligonucleotide
agauacucauuuaugauua

SEQ ID NO: 2757 - RNA, 19 nt, Artificial Sequence
  Synthetic oligonucleotide
uaaucauaaaugaguaucu

SEQ ID NO: 2758 - RNA, 19 nt, Artificial Sequence
  Synthetic oligonucleotide
gauacucauuuaugauuua

SEQ ID NO: 2759 - RNA, 19 nt, Artificial Sequence
  Synthetic oligonucleotide
uaaaucauaaaugaguauc

SEQ ID NO: 2760 - RNA, 19 nt, Artificial Sequence
  Synthetic oligonucleotide
uacucauuuaugauuuuga

SEQ ID NO: 2761 - RNA, 19 nt, Artificial Sequence
  Synthetic oligonucleotide
ucaaaaucauaaaugagua

SEQ ID NO: 2762 - RNA, 19 nt, Artificial Sequence
  Synthetic oligonucleotide
cucauuuaugauuuugcca

SEQ ID NO: 2763 - RNA, 19 nt, Artificial Sequence
  Synthetic oligonucleotide
uggcaaaaucauaaaugag

SEQ ID NO: 2764 - RNA, 19 nt, Artificial Sequence
  Synthetic oligonucleotide
ucauuuaugauuuugccaa

SEQ ID NO: 2765 - RNA, 19 nt, Artificial Sequence
  Synthetic oligonucleotide
uuggcaaaaucauaaauga

SEQ ID NO: 2766 - RNA, 19 nt, Artificial Sequence
  Synthetic oligonucleotide
uuaugauuuugccaauuua

SEQ ID NO: 2767 - RNA, 19 nt, Artificial Sequence
  Synthetic oligonucleotide
uaaauuggcaaaaucauaa

SEQ ID NO: 2768 - RNA, 19 nt, Artificial Sequence
  Synthetic oligonucleotide
ugauuuugccaauuuugga

SEQ ID NO: 2769 - RNA, 19 nt, Artificial Sequence
  Synthetic oligonucleotide
uccaaaauuggcaaaauca

SEQ ID NO: 2770 - RNA, 19 nt, Artificial Sequence
  Synthetic oligonucleotide
auuuugccaauuuugguga

SEQ ID NO: 2771 - RNA, 19 nt, Artificial Sequence
  Synthetic oligonucleotide
ucaccaaaauuggcaaaau

SEQ ID NO: 2772 - RNA, 19 nt, Artificial Sequence
  Synthetic oligonucleotide
uuugccaauuuugguguua

SEQ ID NO: 2773 - RNA, 19 nt, Artificial Sequence
  Synthetic oligonucleotide
uaacaccaaaauuggcaaa

SEQ ID NO: 2774 - RNA, 19 nt, Artificial Sequence
  Synthetic oligonucleotide
gccaauuuugguguucuca

SEQ ID NO: 2775 - RNA, 19 nt, Artificial Sequence
  Synthetic oligonucleotide
ugagaacaccaaaauuggc

SEQ ID NO: 2776 - RNA, 19 nt, Artificial Sequence
  Synthetic oligonucleotide
caauuuugguguucucaga

SEQ ID NO: 2777 - RNA, 19 nt, Artificial Sequence
  Synthetic oligonucleotide
ucugagaacaccaaaauug

SEQ ID NO: 2778 - RNA, 19 nt, Artificial Sequence
  Synthetic oligonucleotide
auuuugguguucucaggua

SEQ ID NO: 2779 - RNA, 19 nt, Artificial Sequence
  Synthetic oligonucleotide
uaccugagaacaccaaaau

SEQ ID NO: 2780 - RNA, 19 nt, Artificial Sequence
  Synthetic oligonucleotide
uuuugguguucucagguua

SEQ ID NO: 2781 - RNA, 19 nt, Artificial Sequence
  Synthetic oligonucleotide
uaaccugagaacaccaaaa

SEQ ID NO: 2782 - RNA, 19 nt, Artificial Sequence
  Synthetic oligonucleotide
uuugguguucucagguuaa

SEQ ID NO: 2783 - RNA, 19 nt, Artificial Sequence
  Synthetic oligonucleotide
uuaaccugagaacaccaaa

SEQ ID NO: 2784 - RNA, 19 nt, Artificial Sequence
  Synthetic oligonucleotide
gguguucucagguuaucga

SEQ ID NO: 2785 - RNA, 19 nt, Artificial Sequence
  Synthetic oligonucleotide
ucgauaaccugagaacacc

SEQ ID NO: 2786 - RNA, 19 nt, Artificial Sequence
  Synthetic oligonucleotide
guucucagguuaucggaga

SEQ ID NO: 2787 - RNA, 19 nt, Artificial Sequence
  Synthetic oligonucleotide
ucuccgauaaccugagaac

SEQ ID NO: 2788 - RNA, 19 nt, Artificial Sequence
  Synthetic oligonucleotide
gagccagcaccgcucuuua

SEQ ID NO: 2789 - RNA, 19 nt, Artificial Sequence
  Synthetic oligonucleotide
uaaagagcggugcuggcuc

SEQ ID NO: 2790 - RNA, 19 nt, Artificial Sequence
  Synthetic oligonucleotide
gccagcaccgcucuuugaa

SEQ ID NO: 2791 - RNA, 19 nt, Artificial Sequence
  Synthetic oligonucleotide
uucaaagagcggugcuggc

SEQ ID NO: 2792 - RNA, 19 nt, Artificial Sequence
  Synthetic oligonucleotide
ccagcaccgcucuuugaca

SEQ ID NO: 2793 - RNA, 19 nt, Artificial Sequence
  Synthetic oligonucleotide
ugucaaagagcggugcugg

SEQ ID NO: 2794 - RNA, 19 nt, Artificial Sequence
  Synthetic oligonucleotide
caccgcucuuugaccuuga

SEQ ID NO: 2795 - RNA, 19 nt, Artificial Sequence
  Synthetic oligonucleotide
ucaaggucaaagagcggug

SEQ ID NO: 2796 - RNA, 19 nt, Artificial Sequence
  Synthetic oligonucleotide
uuugaccuugccaugcuua

SEQ ID NO: 2797 - RNA, 19 nt, Artificial Sequence
  Synthetic oligonucleotide
uaagcauggcaaggucaaa

SEQ ID NO: 2798 - RNA, 19 nt, Artificial Sequence
  Synthetic oligonucleotide
cuugccaugcuugccuuaa

SEQ ID NO: 2799 - RNA, 19 nt, Artificial Sequence
  Synthetic oligonucleotide
uuaaggcaagcauggcaag

SEQ ID NO: 2800 - RNA, 19 nt, Artificial Sequence
  Synthetic oligonucleotide
ugccaugcuugccuuagaa

SEQ ID NO: 2801 - RNA, 19 nt, Artificial Sequence
  Synthetic oligonucleotide
uucuaaggcaagcauggca

SEQ ID NO: 2802 - RNA, 19 nt, Artificial Sequence
  Synthetic oligonucleotide
ccaugcuugccuuagauaa

SEQ ID NO: 2803 - RNA, 19 nt, Artificial Sequence
  Synthetic oligonucleotide
uuaucuaaggcaagcaugg

SEQ ID NO: 2804 - RNA, 19 nt, Artificial Sequence
  Synthetic oligonucleotide
caugcuugccuuagauaga

SEQ ID NO: 2805 - RNA, 19 nt, Artificial Sequence
  Synthetic oligonucleotide
ucuaucuaaggcaagcaug

SEQ ID NO: 2806 - RNA, 19 nt, Artificial Sequence
  Synthetic oligonucleotide
gcuugccuuagauagucca

SEQ ID NO: 2807 - RNA, 19 nt, Artificial Sequence
  Synthetic oligonucleotide
uggacuaucuaaggcaagc

SEQ ID NO: 2808 - RNA, 19 nt, Artificial Sequence
  Synthetic oligonucleotide
uugccuuagauaguccaga

SEQ ID NO: 2809 - RNA, 19 nt, Artificial Sequence
  Synthetic oligonucleotide
ucuggacuaucuaaggcaa

SEQ ID NO: 2810 - RNA, 19 nt, Artificial Sequence
  Synthetic oligonucleotide
ugccuuagauaguccagaa

SEQ ID NO: 2811 - RNA, 19 nt, Artificial Sequence
  Synthetic oligonucleotide
uucuggacuaucuaaggca

SEQ ID NO: 2812 - RNA, 19 nt, Artificial Sequence
  Synthetic oligonucleotide
uuagauaguccagagagua

SEQ ID NO: 2813 - RNA, 19 nt, Artificial Sequence
  Synthetic oligonucleotide
uacucucuggacuaucuaa

SEQ ID NO: 2814 - RNA, 19 nt, Artificial Sequence
  Synthetic oligonucleotide
gaggaagauggucccaaaa

SEQ ID NO: 2815 - RNA, 19 nt, Artificial Sequence
  Synthetic oligonucleotide
uuuugggaccaucuuccuc

SEQ ID NO: 2816 - RNA, 19 nt, Artificial Sequence
  Synthetic oligonucleotide
aagauggucccaaagaaga

SEQ ID NO: 2817 - RNA, 19 nt, Artificial Sequence
  Synthetic oligonucleotide
ucuucuuugggaccaucuu

SEQ ID NO: 2818 - RNA, 19 nt, Artificial Sequence
  Synthetic oligonucleotide
agauggucccaaagaagga

SEQ ID NO: 2819 - RNA, 19 nt, Artificial Sequence
  Synthetic oligonucleotide
uccuucuuugggaccaucu

SEQ ID NO: 2820 - RNA, 19 nt, Artificial Sequence
  Synthetic oligonucleotide
ggucccaaagaaggacuua

SEQ ID NO: 2821 - RNA, 19 nt, Artificial Sequence
  Synthetic oligonucleotide
uaaguccuucuuugggacc

SEQ ID NO: 2822 - RNA, 19 nt, Artificial Sequence
  Synthetic oligonucleotide
cccaaagaaggacuugcua

SEQ ID NO: 2823 - RNA, 19 nt, Artificial Sequence
  Synthetic oligonucleotide
uagcaaguccuucuuuggg

SEQ ID NO: 2824 - RNA, 19 nt, Artificial Sequence
  Synthetic oligonucleotide
aaagaaggacuugcugaaa

SEQ ID NO: 2825 - RNA, 19 nt, Artificial Sequence
  Synthetic oligonucleotide
uuucagcaaguccuucuuu

SEQ ID NO: 2826 - RNA, 19 nt, Artificial Sequence
  Synthetic oligonucleotide
agaaggacuugcugaauaa

SEQ ID NO: 2827 - RNA, 19 nt, Artificial Sequence
  Synthetic oligonucleotide
uuauucagcaaguccuucu

SEQ ID NO: 2828 - RNA, 19 nt, Artificial Sequence
  Synthetic oligonucleotide
aaggacuugcugaauacaa

SEQ ID NO: 2829 - RNA, 19 nt, Artificial Sequence
  Synthetic oligonucleotide
uuguauucagcaaguccuu

SEQ ID NO: 2830 - RNA, 19 nt, Artificial Sequence
  Synthetic oligonucleotide
aggacuugcugaauacaua

SEQ ID NO: 2831 - RNA, 19 nt, Artificial Sequence
  Synthetic oligonucleotide
uauguauucagcaaguccu

SEQ ID NO: 2832 - RNA, 19 nt, Artificial Sequence
  Synthetic oligonucleotide
ggacuugcugaauacauua

SEQ ID NO: 2833 - RNA, 19 nt, Artificial Sequence
  Synthetic oligonucleotide
uaauguauucagcaagucc

SEQ ID NO: 2834 - RNA, 19 nt, Artificial Sequence
  Synthetic oligonucleotide
gacuugcugaauacauuga

SEQ ID NO: 2835 - RNA, 19 nt, Artificial Sequence
  Synthetic oligonucleotide
ucaauguauucagcaaguc

SEQ ID NO: 2836 - RNA, 19 nt, Artificial Sequence
  Synthetic oligonucleotide
acuugcugaauacauugua

SEQ ID NO: 2837 - RNA, 19 nt, Artificial Sequence
  Synthetic oligonucleotide
uacaauguauucagcaagu

SEQ ID NO: 2838 - RNA, 19 nt, Artificial Sequence
  Synthetic oligonucleotide
cuugcugaauacauuguua

SEQ ID NO: 2839 - RNA, 19 nt, Artificial Sequence
  Synthetic oligonucleotide
uaacaauguauucagcaag

SEQ ID NO: 2840 - RNA, 19 nt, Artificial Sequence
  Synthetic oligonucleotide
gcugaauacauuguugaga

SEQ ID NO: 2841 - RNA, 19 nt, Artificial Sequence
  Synthetic oligonucleotide
ucucaacaauguauucagc

SEQ ID NO: 2842 - RNA, 19 nt, Artificial Sequence
  Synthetic oligonucleotide
cugaauacauuguugagua

SEQ ID NO: 2843 - RNA, 19 nt, Artificial Sequence
  Synthetic oligonucleotide
uacucaacaauguauucag

SEQ ID NO: 2844 - RNA, 19 nt, Artificial Sequence
  Synthetic oligonucleotide
ugaauacauuguugaguua

SEQ ID NO: 2845 - RNA, 19 nt, Artificial Sequence
  Synthetic oligonucleotide
uaacucaacaauguauuca

SEQ ID NO: 2846 - RNA, 19 nt, Artificial Sequence
  Synthetic oligonucleotide
aauacauuguugaguuuca

SEQ ID NO: 2847 - RNA, 19 nt, Artificial Sequence
  Synthetic oligonucleotide
ugaaacucaacaauguauu

SEQ ID NO: 2848 - RNA, 19 nt, Artificial Sequence
  Synthetic oligonucleotide
uacauuguugaguuucuga

SEQ ID NO: 2849 - RNA, 19 nt, Artificial Sequence
  Synthetic oligonucleotide
ucagaaacucaacaaugua

SEQ ID NO: 2850 - RNA, 19 nt, Artificial Sequence
  Synthetic oligonucleotide
uugaguuucugaagaagaa

SEQ ID NO: 2851 - RNA, 19 nt, Artificial Sequence
  Synthetic oligonucleotide
uucuucuucagaaacucaa

SEQ ID NO: 2852 - RNA, 19 nt, Artificial Sequence
  Synthetic oligonucleotide
gaguuucugaagaagaaga

SEQ ID NO: 2853 - RNA, 19 nt, Artificial Sequence
  Synthetic oligonucleotide
ucuucuucuucagaaacuc

SEQ ID NO: 2854 - RNA, 19 nt, Artificial Sequence
  Synthetic oligonucleotide
guuucugaagaagaaggca

SEQ ID NO: 2855 - RNA, 19 nt, Artificial Sequence
  Synthetic oligonucleotide
ugccuucuucuucagaaac

SEQ ID NO: 2856 - RNA, 19 nt, Artificial Sequence
  Synthetic oligonucleotide
agaaggcugagaugcuuga

SEQ ID NO: 2857 - RNA, 19 nt, Artificial Sequence
  Synthetic oligonucleotide
ucaagcaucucagccuucu

SEQ ID NO: 2858 - RNA, 19 nt, Artificial Sequence
  Synthetic oligonucleotide
gaaggcugagaugcuugca

SEQ ID NO: 2859 - RNA, 19 nt, Artificial Sequence
  Synthetic oligonucleotide
ugcaagcaucucagccuuc

SEQ ID NO: 2860 - RNA, 19 nt, Artificial Sequence
  Synthetic oligonucleotide
aaggcugagaugcuugcaa

SEQ ID NO: 2861 - RNA, 19 nt, Artificial Sequence
  Synthetic oligonucleotide
uugcaagcaucucagccuu

SEQ ID NO: 2862 - RNA, 19 nt, Artificial Sequence
  Synthetic oligonucleotide
ggcugagaugcuugcagaa

SEQ ID NO: 2863 - RNA, 19 nt, Artificial Sequence
  Synthetic oligonucleotide
uucugcaagcaucucagcc

SEQ ID NO: 2864 - RNA, 19 nt, Artificial Sequence
  Synthetic oligonucleotide
gcugagaugcuugcagaca

SEQ ID NO: 2865 - RNA, 19 nt, Artificial Sequence
  Synthetic oligonucleotide
ugucugcaagcaucucagc

SEQ ID NO: 2866 - RNA, 19 nt, Artificial Sequence
  Synthetic oligonucleotide
cugagaugcuugcagacua

SEQ ID NO: 2867 - RNA, 19 nt, Artificial Sequence
  Synthetic oligonucleotide
uagucugcaagcaucucag

SEQ ID NO: 2868 - RNA, 19 nt, Artificial Sequence
  Synthetic oligonucleotide
ugagaugcuugcagacuaa

SEQ ID NO: 2869 - RNA, 19 nt, Artificial Sequence
  Synthetic oligonucleotide
uuagucugcaagcaucuca

SEQ ID NO: 2870 - RNA, 19 nt, Artificial Sequence
  Synthetic oligonucleotide
gagaugcuugcagacuaua

SEQ ID NO: 2871 - RNA, 19 nt, Artificial Sequence
  Synthetic oligonucleotide
uauagucugcaagcaucuc

SEQ ID NO: 2872 - RNA, 19 nt, Artificial Sequence
  Synthetic oligonucleotide
augcuugcagacuauuuca

SEQ ID NO: 2873 - RNA, 19 nt, Artificial Sequence
  Synthetic oligonucleotide
ugaaauagucugcaagcau

SEQ ID NO: 2874 - RNA, 19 nt, Artificial Sequence
  Synthetic oligonucleotide
gcuugcagacuauuucuca

SEQ ID NO: 2875 - RNA, 19 nt, Artificial Sequence
  Synthetic oligonucleotide
ugagaaauagucugcaagc

SEQ ID NO: 2876 - RNA, 19 nt, Artificial Sequence
  Synthetic oligonucleotide
cuugcagacuauuucucua

SEQ ID NO: 2877 - RNA, 19 nt, Artificial Sequence
  Synthetic oligonucleotide
uagagaaauagucugcaag

SEQ ID NO: 2878 - RNA, 19 nt, Artificial Sequence
  Synthetic oligonucleotide
uugcagacuauuucucuua

SEQ ID NO: 2879 - RNA, 19 nt, Artificial Sequence
  Synthetic oligonucleotide
uaagagaaauagucugcaa

SEQ ID NO: 2880 - RNA, 19 nt, Artificial Sequence
  Synthetic oligonucleotide
ugcagacuauuucucuuua

SEQ ID NO: 2881 - RNA, 19 nt, Artificial Sequence
  Synthetic oligonucleotide
uaaagagaaauagucugca

SEQ ID NO: 2882 - RNA, 19 nt, Artificial Sequence
  Synthetic oligonucleotide
cagacuauuucucuuugga

SEQ ID NO: 2883 - RNA, 19 nt, Artificial Sequence
  Synthetic oligonucleotide
uccaaagagaaauagucug

SEQ ID NO: 2884 - RNA, 19 nt, Artificial Sequence
  Synthetic oligonucleotide
auuucucuuuggaaauuga

SEQ ID NO: 2885 - RNA, 19 nt, Artificial Sequence
  Synthetic oligonucleotide
ucaauuuccaaagagaaau

SEQ ID NO: 2886 - RNA, 19 nt, Artificial Sequence
  Synthetic oligonucleotide
aauugaugaggaagggaaa

SEQ ID NO: 2887 - RNA, 19 nt, Artificial Sequence
  Synthetic oligonucleotide
uuucccuuccucaucaauu

SEQ ID NO: 2888 - RNA, 19 nt, Artificial Sequence
  Synthetic oligonucleotide
augaggaagggaaccugaa

SEQ ID NO: 2889 - RNA, 19 nt, Artificial Sequence
  Synthetic oligonucleotide
uucagguucccuuccucau

SEQ ID NO: 2890 - RNA, 19 nt, Artificial Sequence
  Synthetic oligonucleotide
gaagggaaccugauuggaa

SEQ ID NO: 2891 - RNA, 19 nt, Artificial Sequence
  Synthetic oligonucleotide
uuccaaucagguucccuuc

SEQ ID NO: 2892 - RNA, 19 nt, Artificial Sequence
  Synthetic oligonucleotide
aagggaaccugauuggaua

SEQ ID NO: 2893 - RNA, 19 nt, Artificial Sequence
  Synthetic oligonucleotide
uauccaaucagguucccuu

SEQ ID NO: 2894 - RNA, 19 nt, Artificial Sequence
  Synthetic oligonucleotide
gggaaccugauuggauuaa

SEQ ID NO: 2895 - RNA, 19 nt, Artificial Sequence
  Synthetic oligonucleotide
uuaauccaaucagguuccc

SEQ ID NO: 2896 - RNA, 19 nt, Artificial Sequence
  Synthetic oligonucleotide
ccugauuggauuaccccua

SEQ ID NO: 2897 - RNA, 19 nt, Artificial Sequence
  Synthetic oligonucleotide
uagggguaauccaaucagg

SEQ ID NO: 2898 - RNA, 19 nt, Artificial Sequence
  Synthetic oligonucleotide
uuggauuaccccuucugaa

SEQ ID NO: 2899 - RNA, 19 nt, Artificial Sequence
  Synthetic oligonucleotide
uucagaagggguaauccaa

SEQ ID NO: 2900 - RNA, 19 nt, Artificial Sequence
  Synthetic oligonucleotide
uggauuaccccuucugaua

SEQ ID NO: 2901 - RNA, 19 nt, Artificial Sequence
  Synthetic oligonucleotide
uaucagaagggguaaucca

SEQ ID NO: 2902 - RNA, 19 nt, Artificial Sequence
  Synthetic oligonucleotide
ggauuaccccuucugauua

SEQ ID NO: 2903 - RNA, 19 nt, Artificial Sequence
  Synthetic oligonucleotide
uaaucagaagggguaaucc

SEQ ID NO: 2904 - RNA, 19 nt, Artificial Sequence
  Synthetic oligonucleotide
auuaccccuucugauugaa

SEQ ID NO: 2905 - RNA, 19 nt, Artificial Sequence
  Synthetic oligonucleotide
uucaaucagaagggguaau

SEQ ID NO: 2906 - RNA, 19 nt, Artificial Sequence
  Synthetic oligonucleotide
uaccccuucugauugacaa

SEQ ID NO: 2907 - RNA, 19 nt, Artificial Sequence
  Synthetic oligonucleotide
uugucaaucagaaggggua

SEQ ID NO: 2908 - RNA, 19 nt, Artificial Sequence
  Synthetic oligonucleotide
ccuucugauugacaacuaa

SEQ ID NO: 2909 - RNA, 19 nt, Artificial Sequence
  Synthetic oligonucleotide
uuaguugucaaucagaagg

SEQ ID NO: 2910 - RNA, 19 nt, Artificial Sequence
  Synthetic oligonucleotide
uucugauugacaacuauga

SEQ ID NO: 2911 - RNA, 19 nt, Artificial Sequence
  Synthetic oligonucleotide
ucauaguugucaaucagaa

SEQ ID NO: 2912 - RNA, 19 nt, Artificial Sequence
  Synthetic oligonucleotide
ugauugacaacuaugugca

SEQ ID NO: 2913 - RNA, 19 nt, Artificial Sequence
  Synthetic oligonucleotide
ugcacauaguugucaauca

SEQ ID NO: 2914 - RNA, 19 nt, Artificial Sequence
  Synthetic oligonucleotide
gauugacaacuaugugcca

SEQ ID NO: 2915 - RNA, 19 nt, Artificial Sequence
  Synthetic oligonucleotide
uggcacauaguugucaauc

SEQ ID NO: 2916 - RNA, 19 nt, Artificial Sequence
  Synthetic oligonucleotide
cuuuggagggacugccuaa

SEQ ID NO: 2917 - RNA, 19 nt, Artificial Sequence
  Synthetic oligonucleotide
uuaggcagucccuccaaag

SEQ ID NO: 2918 - RNA, 19 nt, Artificial Sequence
  Synthetic oligonucleotide
uuuggagggacugccuaua

SEQ ID NO: 2919 - RNA, 19 nt, Artificial Sequence
  Synthetic oligonucleotide
uauaggcagucccuccaaa

SEQ ID NO: 2920 - RNA, 19 nt, Artificial Sequence
  Synthetic oligonucleotide
uuggagggacugccuauca

SEQ ID NO: 2921 - RNA, 19 nt, Artificial Sequence
  Synthetic oligonucleotide
ugauaggcagucccuccaa

SEQ ID NO: 2922 - RNA, 19 nt, Artificial Sequence
  Synthetic oligonucleotide
uggagggacugccuaucua

SEQ ID NO: 2923 - RNA, 19 nt, Artificial Sequence
  Synthetic oligonucleotide
uagauaggcagucccucca

SEQ ID NO: 2924 - RNA, 19 nt, Artificial Sequence
  Synthetic oligonucleotide
ggagggacugccuaucuua

SEQ ID NO: 2925 - RNA, 19 nt, Artificial Sequence
  Synthetic oligonucleotide
uaagauaggcagucccucc

SEQ ID NO: 2926 - RNA, 19 nt, Artificial Sequence
  Synthetic oligonucleotide
gagggacugccuaucuuca

SEQ ID NO: 2927 - RNA, 19 nt, Artificial Sequence
  Synthetic oligonucleotide
ugaagauaggcagucccuc

SEQ ID NO: 2928 - RNA, 19 nt, Artificial Sequence
  Synthetic oligonucleotide
gggacugccuaucuucaua

SEQ ID NO: 2929 - RNA, 19 nt, Artificial Sequence
  Synthetic oligonucleotide
uaugaagauaggcaguccc

SEQ ID NO: 2930 - RNA, 19 nt, Artificial Sequence
  Synthetic oligonucleotide
ggacugccuaucuucauua

SEQ ID NO: 2931 - RNA, 19 nt, Artificial Sequence
  Synthetic oligonucleotide
uaaugaagauaggcagucc

SEQ ID NO: 2932 - RNA, 19 nt, Artificial Sequence
  Synthetic oligonucleotide
acugccuaucuucauucua

SEQ ID NO: 2933 - RNA, 19 nt, Artificial Sequence
  Synthetic oligonucleotide
uagaaugaagauaggcagu

SEQ ID NO: 2934 - RNA, 19 nt, Artificial Sequence
  Synthetic oligonucleotide
cugccuaucuucauucuua

SEQ ID NO: 2935 - RNA, 19 nt, Artificial Sequence
  Synthetic oligonucleotide
uaagaaugaagauaggcag

SEQ ID NO: 2936 - RNA, 19 nt, Artificial Sequence
  Synthetic oligonucleotide
gccuaucuucauucuucga

SEQ ID NO: 2937 - RNA, 19 nt, Artificial Sequence
  Synthetic oligonucleotide
ucgaagaaugaagauaggc

SEQ ID NO: 2938 - RNA, 19 nt, Artificial Sequence
  Synthetic oligonucleotide
ccuaucuucauucuucgaa

SEQ ID NO: 2939 - RNA, 19 nt, Artificial Sequence
  Synthetic oligonucleotide
uucgaagaaugaagauagg

SEQ ID NO: 2940 - RNA, 19 nt, Artificial Sequence
  Synthetic oligonucleotide
cuaucuucauucuucgaca

SEQ ID NO: 2941 - RNA, 19 nt, Artificial Sequence
  Synthetic oligonucleotide
ugucgaagaaugaagauag

SEQ ID NO: 2942 - RNA, 19 nt, Artificial Sequence
  Synthetic oligonucleotide
uaucuucauucuucgacua

SEQ ID NO: 2943 - RNA, 19 nt, Artificial Sequence
  Synthetic oligonucleotide
uagucgaagaaugaagaua

SEQ ID NO: 2944 - RNA, 19 nt, Artificial Sequence
  Synthetic oligonucleotide
aucuucauucuucgacuaa

SEQ ID NO: 2945 - RNA, 19 nt, Artificial Sequence
  Synthetic oligonucleotide
uuagucgaagaaugaagau

SEQ ID NO: 2946 - RNA, 19 nt, Artificial Sequence
  Synthetic oligonucleotide
auucuucgacuagccacua

SEQ ID NO: 2947 - RNA, 19 nt, Artificial Sequence
  Synthetic oligonucleotide
uaguggcuagucgaagaau

SEQ ID NO: 2948 - RNA, 19 nt, Artificial Sequence
  Synthetic oligonucleotide
ucgacuagccacugaggua

SEQ ID NO: 2949 - RNA, 19 nt, Artificial Sequence
  Synthetic oligonucleotide
uaccucaguggcuagucga

SEQ ID NO: 2950 - RNA, 19 nt, Artificial Sequence
  Synthetic oligonucleotide
gacuagccacugaggugaa

SEQ ID NO: 2951 - RNA, 19 nt, Artificial Sequence
  Synthetic oligonucleotide
uucaccucaguggcuaguc

SEQ ID NO: 2952 - RNA, 19 nt, Artificial Sequence
  Synthetic oligonucleotide
acuagccacugaggugaaa

SEQ ID NO: 2953 - RNA, 19 nt, Artificial Sequence
  Synthetic oligonucleotide
uuucaccucaguggcuagu

SEQ ID NO: 2954 - RNA, 19 nt, Artificial Sequence
  Synthetic oligonucleotide
cuagccacugaggugaaua

SEQ ID NO: 2955 - RNA, 19 nt, Artificial Sequence
  Synthetic oligonucleotide
uauucaccucaguggcuag

SEQ ID NO: 2956 - RNA, 19 nt, Artificial Sequence
  Synthetic oligonucleotide
agccacugaggugaauuga

SEQ ID NO: 2957 - RNA, 19 nt, Artificial Sequence
  Synthetic oligonucleotide
ucaauucaccucaguggcu

SEQ ID NO: 2958 - RNA, 19 nt, Artificial Sequence
  Synthetic oligonucleotide
gccacugaggugaauugga

SEQ ID NO: 2959 - RNA, 19 nt, Artificial Sequence
  Synthetic oligonucleotide
uccaauucaccucaguggc

SEQ ID NO: 2960 - RNA, 19 nt, Artificial Sequence
  Synthetic oligonucleotide
ccacugaggugaauuggga

SEQ ID NO: 2961 - RNA, 19 nt, Artificial Sequence
  Synthetic oligonucleotide
ucccaauucaccucagugg

SEQ ID NO: 2962 - RNA, 19 nt, Artificial Sequence
  Synthetic oligonucleotide
cacugaggugaauugggaa

SEQ ID NO: 2963 - RNA, 19 nt, Artificial Sequence
  Synthetic oligonucleotide
uucccaauucaccucagug

SEQ ID NO: 2964 - RNA, 19 nt, Artificial Sequence
  Synthetic oligonucleotide
acugaggugaauugggaca

SEQ ID NO: 2965 - RNA, 19 nt, Artificial Sequence
  Synthetic oligonucleotide
ugucccaauucaccucagu

SEQ ID NO: 2966 - RNA, 19 nt, Artificial Sequence
  Synthetic oligonucleotide
ggugaauugggacgaagaa

SEQ ID NO: 2967 - RNA, 19 nt, Artificial Sequence
  Synthetic oligonucleotide
uucuucgucccaauucacc

SEQ ID NO: 2968 - RNA, 19 nt, Artificial Sequence
  Synthetic oligonucleotide
ugaauugggacgaagaaaa

SEQ ID NO: 2969 - RNA, 19 nt, Artificial Sequence
  Synthetic oligonucleotide
uuuucuucgucccaauuca

SEQ ID NO: 2970 - RNA, 19 nt, Artificial Sequence
  Synthetic oligonucleotide
aauugggacgaagaaaaga

SEQ ID NO: 2971 - RNA, 19 nt, Artificial Sequence
  Synthetic oligonucleotide
ucuuuucuucgucccaauu

SEQ ID NO: 2972 - RNA, 19 nt, Artificial Sequence
  Synthetic oligonucleotide
auugggacgaagaaaagga

SEQ ID NO: 2973 - RNA, 19 nt, Artificial Sequence
  Synthetic oligonucleotide
uccuuuucuucgucccaau

SEQ ID NO: 2974 - RNA, 19 nt, Artificial Sequence
  Synthetic oligonucleotide
uugggacgaagaaaaggaa

SEQ ID NO: 2975 - RNA, 19 nt, Artificial Sequence
  Synthetic oligonucleotide
uuccuuuucuucgucccaa

SEQ ID NO: 2976 - RNA, 19 nt, Artificial Sequence
  Synthetic oligonucleotide
acgaagaaaaggaauguua

SEQ ID NO: 2977 - RNA, 19 nt, Artificial Sequence
  Synthetic oligonucleotide
uaacauuccuuuucuucgu

SEQ ID NO: 2978 - RNA, 19 nt, Artificial Sequence
  Synthetic oligonucleotide
agaaaaggaauguuuugaa

SEQ ID NO: 2979 - RNA, 19 nt, Artificial Sequence
  Synthetic oligonucleotide
uucaaaacauuccuuuucu

SEQ ID NO: 2980 - RNA, 19 nt, Artificial Sequence
  Synthetic oligonucleotide
ggaauguuuugaaagccua

SEQ ID NO: 2981 - RNA, 19 nt, Artificial Sequence
  Synthetic oligonucleotide
uaggcuuucaaaacauucc

SEQ ID NO: 2982 - RNA, 19 nt, Artificial Sequence
  Synthetic oligonucleotide
gaauguuuugaaagccuca

SEQ ID NO: 2983 - RNA, 19 nt, Artificial Sequence
  Synthetic oligonucleotide
ugaggcuuucaaaacauuc

SEQ ID NO: 2984 - RNA, 19 nt, Artificial Sequence
  Synthetic oligonucleotide
aauguuuugaaagccucaa

SEQ ID NO: 2985 - RNA, 19 nt, Artificial Sequence
  Synthetic oligonucleotide
uugaggcuuucaaaacauu

SEQ ID NO: 2986 - RNA, 19 nt, Artificial Sequence
  Synthetic oligonucleotide
guuuugaaagccucaguaa

SEQ ID NO: 2987 - RNA, 19 nt, Artificial Sequence
  Synthetic oligonucleotide
uuacugaggcuuucaaaac

SEQ ID NO: 2988 - RNA, 19 nt, Artificial Sequence
  Synthetic oligonucleotide
uuuugaaagccucaguaaa

SEQ ID NO: 2989 - RNA, 19 nt, Artificial Sequence
  Synthetic oligonucleotide
uuuacugaggcuuucaaaa

SEQ ID NO: 2990 - RNA, 19 nt, Artificial Sequence
  Synthetic oligonucleotide
uugaaagccucaguaaaga

SEQ ID NO: 2991 - RNA, 19 nt, Artificial Sequence
  Synthetic oligonucleotide
ucuuuacugaggcuuucaa

SEQ ID NO: 2992 - RNA, 19 nt, Artificial Sequence
  Synthetic oligonucleotide
gccucaguaaagaaugcga

SEQ ID NO: 2993 - RNA, 19 nt, Artificial Sequence
  Synthetic oligonucleotide
ucgcauucuuuacugaggc

SEQ ID NO: 2994 - RNA, 19 nt, Artificial Sequence
  Synthetic oligonucleotide
cucaguaaagaaugcgcua

SEQ ID NO: 2995 - RNA, 19 nt, Artificial Sequence
  Synthetic oligonucleotide
uagcgcauucuuuacugag

SEQ ID NO: 2996 - RNA, 19 nt, Artificial Sequence
  Synthetic oligonucleotide
ucaguaaagaaugcgcuaa

SEQ ID NO: 2997 - RNA, 19 nt, Artificial Sequence
  Synthetic oligonucleotide
uuagcgcauucuuuacuga

SEQ ID NO: 2998 - RNA, 19 nt, Artificial Sequence
  Synthetic oligonucleotide
guaaagaaugcgcuaugua

SEQ ID NO: 2999 - RNA, 19 nt, Artificial Sequence
  Synthetic oligonucleotide
uacauagcgcauucuuuac

SEQ ID NO: 3000 - RNA, 19 nt, Artificial Sequence
  Synthetic oligonucleotide
aagaaugcgcuauguucua

SEQ ID NO: 3001 - RNA, 19 nt, Artificial Sequence
  Synthetic oligonucleotide
uagaacauagcgcauucuu

SEQ ID NO: 3002 - RNA, 19 nt, Artificial Sequence
  Synthetic oligonucleotide
agaaugcgcuauguucuaa

SEQ ID NO: 3003 - RNA, 19 nt, Artificial Sequence
  Synthetic oligonucleotide
uuagaacauagcgcauucu

SEQ ID NO: 3004 - RNA, 19 nt, Artificial Sequence
  Synthetic oligonucleotide
gaaugcgcuauguucuaua

SEQ ID NO: 3005 - RNA, 19 nt, Artificial Sequence
  Synthetic oligonucleotide
uauagaacauagcgcauuc

SEQ ID NO: 3006 - RNA, 19 nt, Artificial Sequence
  Synthetic oligonucleotide
aaugcgcuauguucuauua

SEQ ID NO: 3007 - RNA, 19 nt, Artificial Sequence
  Synthetic oligonucleotide
uaauagaacauagcgcauu

SEQ ID NO: 3008 - RNA, 19 nt, Artificial Sequence
  Synthetic oligonucleotide
ugcgcuauguucuauucca

SEQ ID NO: 3009 - RNA, 19 nt, Artificial Sequence
  Synthetic oligonucleotide
uggaauagaacauagcgca

SEQ ID NO: 3010 - RNA, 19 nt, Artificial Sequence
  Synthetic oligonucleotide
gcgcuauguucuauuccaa

SEQ ID NO: 3011 - RNA, 19 nt, Artificial Sequence
  Synthetic oligonucleotide
uuggaauagaacauagcgc

SEQ ID NO: 3012 - RNA, 19 nt, Artificial Sequence
  Synthetic oligonucleotide
cuauguucuauuccaucca

SEQ ID NO: 3013 - RNA, 19 nt, Artificial Sequence
  Synthetic oligonucleotide
uggauggaauagaacauag

SEQ ID NO: 3014 - RNA, 19 nt, Artificial Sequence
  Synthetic oligonucleotide
guucuauuccauccggaaa

SEQ ID NO: 3015 - RNA, 19 nt, Artificial Sequence
  Synthetic oligonucleotide
uuuccggauggaauagaac

SEQ ID NO: 3016 - RNA, 19 nt, Artificial Sequence
  Synthetic oligonucleotide
uuccauccggaagcaguaa

SEQ ID NO: 3017 - RNA, 19 nt, Artificial Sequence
  Synthetic oligonucleotide
uuacugcuuccggauggaa

SEQ ID NO: 3018 - RNA, 19 nt, Artificial Sequence
  Synthetic oligonucleotide
uccauccggaagcaguaca

SEQ ID NO: 3019 - RNA, 19 nt, Artificial Sequence
  Synthetic oligonucleotide
uguacugcuuccggaugga

SEQ ID NO: 3020 - RNA, 19 nt, Artificial Sequence
  Synthetic oligonucleotide
cauccggaagcaguacaua

SEQ ID NO: 3021 - RNA, 19 nt, Artificial Sequence
  Synthetic oligonucleotide
uauguacugcuuccggaug

SEQ ID NO: 3022 - RNA, 19 nt, Artificial Sequence
  Synthetic oligonucleotide
uccggaagcaguacauaua

SEQ ID NO: 3023 - RNA, 19 nt, Artificial Sequence
  Synthetic oligonucleotide
uauauguacugcuuccgga

SEQ ID NO: 3024 - RNA, 19 nt, Artificial Sequence
  Synthetic oligonucleotide
ccggaagcaguacauauca

SEQ ID NO: 3025 - RNA, 19 nt, Artificial Sequence
  Synthetic oligonucleotide
ugauauguacugcuuccgg

SEQ ID NO: 3026 - RNA, 19 nt, Artificial Sequence
  Synthetic oligonucleotide
cggaagcaguacauaucua

SEQ ID NO: 3027 - RNA, 19 nt, Artificial Sequence
  Synthetic oligonucleotide
uagauauguacugcuuccg

SEQ ID NO: 3028 - RNA, 19 nt, Artificial Sequence
  Synthetic oligonucleotide
ggaagcaguacauaucuga

SEQ ID NO: 3029 - RNA, 19 nt, Artificial Sequence
  Synthetic oligonucleotide
ucagauauguacugcuucc

SEQ ID NO: 3030 - RNA, 19 nt, Artificial Sequence
  Synthetic oligonucleotide
gaagcaguacauaucugaa

SEQ ID NO: 3031 - RNA, 19 nt, Artificial Sequence
  Synthetic oligonucleotide
uucagauauguacugcuuc

SEQ ID NO: 3032 - RNA, 19 nt, Artificial Sequence
  Synthetic oligonucleotide
aagcaguacauaucugaga

SEQ ID NO: 3033 - RNA, 19 nt, Artificial Sequence
  Synthetic oligonucleotide
ucucagauauguacugcuu

SEQ ID NO: 3034 - RNA, 19 nt, Artificial Sequence
  Synthetic oligonucleotide
agcaguacauaucugagga

SEQ ID NO: 3035 - RNA, 19 nt, Artificial Sequence
  Synthetic oligonucleotide
uccucagauauguacugcu

SEQ ID NO: 3036 - RNA, 19 nt, Artificial Sequence
  Synthetic oligonucleotide
aguacauaucugaggagua

SEQ ID NO: 3037 - RNA, 19 nt, Artificial Sequence
  Synthetic oligonucleotide
uacuccucagauauguacu

SEQ ID NO: 3038 - RNA, 19 nt, Artificial Sequence
  Synthetic oligonucleotide
ucaggccagcagagugaaa

SEQ ID NO: 3039 - RNA, 19 nt, Artificial Sequence
  Synthetic oligonucleotide
uuucacucugcuggccuga

SEQ ID NO: 3040 - RNA, 19 nt, Artificial Sequence
  Synthetic oligonucleotide
aggccagcagagugaagua

SEQ ID NO: 3041 - RNA, 19 nt, Artificial Sequence
  Synthetic oligonucleotide
uacuucacucugcuggccu

SEQ ID NO: 3042 - RNA, 19 nt, Artificial Sequence
  Synthetic oligonucleotide
ggccagcagagugaaguga

SEQ ID NO: 3043 - RNA, 19 nt, Artificial Sequence
  Synthetic oligonucleotide
ucacuucacucugcuggcc

SEQ ID NO: 3044 - RNA, 19 nt, Artificial Sequence
  Synthetic oligonucleotide
gccagcagagugaagugca

SEQ ID NO: 3045 - RNA, 19 nt, Artificial Sequence
  Synthetic oligonucleotide
ugcacuucacucugcuggc

SEQ ID NO: 3046 - RNA, 19 nt, Artificial Sequence
  Synthetic oligonucleotide
gaagugccuggcuccauua

SEQ ID NO: 3047 - RNA, 19 nt, Artificial Sequence
  Synthetic oligonucleotide
uaauggagccaggcacuuc

SEQ ID NO: 3048 - RNA, 19 nt, Artificial Sequence
  Synthetic oligonucleotide
aagugccuggcuccauuca

SEQ ID NO: 3049 - RNA, 19 nt, Artificial Sequence
  Synthetic oligonucleotide
ugaauggagccaggcacuu

SEQ ID NO: 3050 - RNA, 19 nt, Artificial Sequence
  Synthetic oligonucleotide
ugccuggcuccauuccaaa

SEQ ID NO: 3051 - RNA, 19 nt, Artificial Sequence
  Synthetic oligonucleotide
uuuggaauggagccaggca

SEQ ID NO: 3052 - RNA, 19 nt, Artificial Sequence
  Synthetic oligonucleotide
uccaaacuccuggaaguga

SEQ ID NO: 3053 - RNA, 19 nt, Artificial Sequence
  Synthetic oligonucleotide
ucacuuccaggaguuugga

SEQ ID NO: 3054 - RNA, 19 nt, Artificial Sequence
  Synthetic oligonucleotide
cuggaaguggacuguggaa

SEQ ID NO: 3055 - RNA, 19 nt, Artificial Sequence
  Synthetic oligonucleotide
uuccacaguccacuuccag

SEQ ID NO: 3056 - RNA, 19 nt, Artificial Sequence
  Synthetic oligonucleotide
ggaaguggacuguggaaca

SEQ ID NO: 3057 - RNA, 19 nt, Artificial Sequence
  Synthetic oligonucleotide
uguuccacaguccacuucc

SEQ ID NO: 3058 - RNA, 19 nt, Artificial Sequence
  Synthetic oligonucleotide
gaaguggacuguggaacaa

SEQ ID NO: 3059 - RNA, 19 nt, Artificial Sequence
  Synthetic oligonucleotide
uuguuccacaguccacuuc

SEQ ID NO: 3060 - RNA, 19 nt, Artificial Sequence
  Synthetic oligonucleotide
aaguggacuguggaacaca

SEQ ID NO: 3061 - RNA, 19 nt, Artificial Sequence
  Synthetic oligonucleotide
uguguuccacaguccacuu

SEQ ID NO: 3062 - RNA, 19 nt, Artificial Sequence
  Synthetic oligonucleotide
aguggacuguggaacacaa

SEQ ID NO: 3063 - RNA, 19 nt, Artificial Sequence
  Synthetic oligonucleotide
uuguguuccacaguccacu

SEQ ID NO: 3064 - RNA, 19 nt, Artificial Sequence
  Synthetic oligonucleotide
ggacuguggaacacauuga

SEQ ID NO: 3065 - RNA, 19 nt, Artificial Sequence
  Synthetic oligonucleotide
ucaauguguuccacagucc

SEQ ID NO: 3066 - RNA, 19 nt, Artificial Sequence
  Synthetic oligonucleotide
gacuguggaacacauugua

SEQ ID NO: 3067 - RNA, 19 nt, Artificial Sequence
  Synthetic oligonucleotide
uacaauguguuccacaguc

SEQ ID NO: 3068 - RNA, 19 nt, Artificial Sequence
  Synthetic oligonucleotide
acuguggaacacauuguca

SEQ ID NO: 3069 - RNA, 19 nt, Artificial Sequence
  Synthetic oligonucleotide
ugacaauguguuccacagu

SEQ ID NO: 3070 - RNA, 19 nt, Artificial Sequence
  Synthetic oligonucleotide
cuguggaacacauugucua

SEQ ID NO: 3071 - RNA, 19 nt, Artificial Sequence
  Synthetic oligonucleotide
uagacaauguguuccacag

SEQ ID NO: 3072 - RNA, 19 nt, Artificial Sequence
  Synthetic oligonucleotide
guggaacacauugucuaua

SEQ ID NO: 3073 - RNA, 19 nt, Artificial Sequence
  Synthetic oligonucleotide
uauagacaauguguuccac

SEQ ID NO: 3074 - RNA, 19 nt, Artificial Sequence
  Synthetic oligonucleotide
uggaacacauugucuauaa

SEQ ID NO: 3075 - RNA, 19 nt, Artificial Sequence
  Synthetic oligonucleotide
uuauagacaauguguucca

SEQ ID NO: 3076 - RNA, 19 nt, Artificial Sequence
  Synthetic oligonucleotide
aacacauugucuauaaaga

SEQ ID NO: 3077 - RNA, 19 nt, Artificial Sequence
  Synthetic oligonucleotide
ucuuuauagacaauguguu

SEQ ID NO: 3078 - RNA, 19 nt, Artificial Sequence
  Synthetic oligonucleotide
acacauugucuauaaagca

SEQ ID NO: 3079 - RNA, 19 nt, Artificial Sequence
  Synthetic oligonucleotide
ugcuuuauagacaaugugu

SEQ ID NO: 3080 - RNA, 19 nt, Artificial Sequence
  Synthetic oligonucleotide
cacauugucuauaaagcca

SEQ ID NO: 3081 - RNA, 19 nt, Artificial Sequence
  Synthetic oligonucleotide
uggcuuuauagacaaugug

SEQ ID NO: 3082 - RNA, 19 nt, Artificial Sequence
  Synthetic oligonucleotide
acauugucuauaaagccua

SEQ ID NO: 3083 - RNA, 19 nt, Artificial Sequence
  Synthetic oligonucleotide
uaggcuuuauagacaaugu

SEQ ID NO: 3084 - RNA, 19 nt, Artificial Sequence
  Synthetic oligonucleotide
gccuugcgcucacacauua

SEQ ID NO: 3085 - RNA, 19 nt, Artificial Sequence
  Synthetic oligonucleotide
uaaugugugagcgcaaggc

SEQ ID NO: 3086 - RNA, 19 nt, Artificial Sequence
  Synthetic oligonucleotide
ccuugcgcucacacauuca

SEQ ID NO: 3087 - RNA, 19 nt, Artificial Sequence
  Synthetic oligonucleotide
ugaaugugugagcgcaagg

SEQ ID NO: 3088 - RNA, 19 nt, Artificial Sequence
  Synthetic oligonucleotide
cuugcgcucacacauucua

SEQ ID NO: 3089 - RNA, 19 nt, Artificial Sequence
  Synthetic oligonucleotide
uagaaugugugagcgcaag

SEQ ID NO: 3090 - RNA, 19 nt, Artificial Sequence
  Synthetic oligonucleotide
ugcgcucacacauucugca

SEQ ID NO: 3091 - RNA, 19 nt, Artificial Sequence
  Synthetic oligonucleotide
ugcagaaugugugagcgca

SEQ ID NO: 3092 - RNA, 19 nt, Artificial Sequence
  Synthetic oligonucleotide
cgcucacacauucugccua

SEQ ID NO: 3093 - RNA, 19 nt, Artificial Sequence
  Synthetic oligonucleotide
uaggcagaaugugugagcg

SEQ ID NO: 3094 - RNA, 19 nt, Artificial Sequence
  Synthetic oligonucleotide
cacauucugccuccuaaaa

SEQ ID NO: 3095 - RNA, 19 nt, Artificial Sequence
  Synthetic oligonucleotide
uuuuaggaggcagaaugug

SEQ ID NO: 3096 - RNA, 19 nt, Artificial Sequence
  Synthetic oligonucleotide
cauucugccuccuaaacaa

SEQ ID NO: 3097 - RNA, 19 nt, Artificial Sequence
  Synthetic oligonucleotide
uuguuuaggaggcagaaug

SEQ ID NO: 3098 - RNA, 19 nt, Artificial Sequence
  Synthetic oligonucleotide
uucugccuccuaaacauua

SEQ ID NO: 3099 - RNA, 19 nt, Artificial Sequence
  Synthetic oligonucleotide
uaauguuuaggaggcagaa

SEQ ID NO: 3100 - RNA, 19 nt, Artificial Sequence
  Synthetic oligonucleotide
ucugccuccuaaacauuua

SEQ ID NO: 3101 - RNA, 19 nt, Artificial Sequence
  Synthetic oligonucleotide
uaaauguuuaggaggcaga

SEQ ID NO: 3102 - RNA, 19 nt, Artificial Sequence
  Synthetic oligonucleotide
cagaagauggaaauaucca

SEQ ID NO: 3103 - RNA, 19 nt, Artificial Sequence
  Synthetic oligonucleotide
uggauauuuccaucuucug

SEQ ID NO: 3104 - RNA, 19 nt, Artificial Sequence
  Synthetic oligonucleotide
aagauggaaauauccugca

SEQ ID NO: 3105 - RNA, 19 nt, Artificial Sequence
  Synthetic oligonucleotide
ugcaggauauuuccaucuu

SEQ ID NO: 3106 - RNA, 19 nt, Artificial Sequence
  Synthetic oligonucleotide
agauggaaauauccugcaa

SEQ ID NO: 3107 - RNA, 19 nt, Artificial Sequence
  Synthetic oligonucleotide
uugcaggauauuuccaucu

SEQ ID NO: 3108 - RNA, 19 nt, Artificial Sequence
  Synthetic oligonucleotide
ggaaauauccugcagcuua

SEQ ID NO: 3109 - RNA, 19 nt, Artificial Sequence
  Synthetic oligonucleotide
uaagcugcaggauauuucc

SEQ ID NO: 3110 - RNA, 19 nt, Artificial Sequence
  Synthetic oligonucleotide
aauauccugcagcuugcua

SEQ ID NO: 3111 - RNA, 19 nt, Artificial Sequence
  Synthetic oligonucleotide
uagcaagcugcaggauauu

SEQ ID NO: 3112 - RNA, 19 nt, Artificial Sequence
  Synthetic oligonucleotide
auauccugcagcuugcuaa

SEQ ID NO: 3113 - RNA, 19 nt, Artificial Sequence
  Synthetic oligonucleotide
uuagcaagcugcaggauau

SEQ ID NO: 3114 - RNA, 19 nt, Artificial Sequence
  Synthetic oligonucleotide
uauccugcagcuugcuaaa

SEQ ID NO: 3115 - RNA, 19 nt, Artificial Sequence
  Synthetic oligonucleotide
uuuagcaagcugcaggaua

SEQ ID NO: 3116 - RNA, 19 nt, Artificial Sequence
  Synthetic oligonucleotide
ccugcagcuugcuaaccua

SEQ ID NO: 3117 - RNA, 19 nt, Artificial Sequence
  Synthetic oligonucleotide
uagguuagcaagcugcagg

SEQ ID NO: 3118 - RNA, 19 nt, Artificial Sequence
  Synthetic oligonucleotide
gcuaaccugccugaucuaa

SEQ ID NO: 3119 - RNA, 19 nt, Artificial Sequence
  Synthetic oligonucleotide
uuagaucaggcagguuagc

SEQ ID NO: 3120 - RNA, 19 nt, Artificial Sequence
  Synthetic oligonucleotide
cuaaccugccugaucuaua

SEQ ID NO: 3121 - RNA, 19 nt, Artificial Sequence
  Synthetic oligonucleotide
uauagaucaggcagguuag

SEQ ID NO: 3122 - RNA, 19 nt, Artificial Sequence
  Synthetic oligonucleotide
uaaccugccugaucuauaa

SEQ ID NO: 3123 - RNA, 19 nt, Artificial Sequence
  Synthetic oligonucleotide
uuauagaucaggcagguua

SEQ ID NO: 3124 - RNA, 19 nt, Artificial Sequence
  Synthetic oligonucleotide
ccugccugaucuauacaaa

SEQ ID NO: 3125 - RNA, 19 nt, Artificial Sequence
  Synthetic oligonucleotide
uuuguauagaucaggcagg

SEQ ID NO: 3126 - RNA, 19 nt, Artificial Sequence
  Synthetic oligonucleotide
cugccugaucuauacaaaa

SEQ ID NO: 3127 - RNA, 19 nt, Artificial Sequence
  Synthetic oligonucleotide
uuuuguauagaucaggcag

SEQ ID NO: 3128 - RNA, 19 nt, Artificial Sequence
  Synthetic oligonucleotide
ugccugaucuauacaaaga

SEQ ID NO: 3129 - RNA, 19 nt, Artificial Sequence
  Synthetic oligonucleotide
ucuuuguauagaucaggca

SEQ ID NO: 3130 - RNA, 19 nt, Artificial Sequence
  Synthetic oligonucleotide
gccugaucuauacaaagua

SEQ ID NO: 3131 - RNA, 19 nt, Artificial Sequence
  Synthetic oligonucleotide
uacuuuguauagaucaggc

SEQ ID NO: 3132 - RNA, 19 nt, Artificial Sequence
  Synthetic oligonucleotide
ccugaucuauacaaaguca

SEQ ID NO: 3133 - RNA, 19 nt, Artificial Sequence
  Synthetic oligonucleotide
ugacuuuguauagaucagg

SEQ ID NO: 3134 - RNA, 19 nt, Artificial Sequence
  Synthetic oligonucleotide
ugaucuauacaaagucuua

SEQ ID NO: 3135 - RNA, 19 nt, Artificial Sequence
  Synthetic oligonucleotide
uaagacuuuguauagauca

SEQ ID NO: 3136 - RNA, 19 nt, Artificial Sequence
  Synthetic oligonucleotide
aucuauacaaagucuuuga

SEQ ID NO: 3137 - RNA, 19 nt, Artificial Sequence
  Synthetic oligonucleotide
ucaaagacuuuguauagau

SEQ ID NO: 3138 - RNA, 19 nt, Artificial Sequence
  Synthetic oligonucleotide
ucuauacaaagucuuugaa

SEQ ID NO: 3139 - RNA, 19 nt, Artificial Sequence
  Synthetic oligonucleotide
uucaaagacuuuguauaga

SEQ ID NO: 3140 - RNA, 19 nt, Artificial Sequence
  Synthetic oligonucleotide
cuauacaaagucuuugaga

SEQ ID NO: 3141 - RNA, 19 nt, Artificial Sequence
  Synthetic oligonucleotide
ucucaaagacuuuguauag

SEQ ID NO: 3142 - RNA, 19 nt, Artificial Sequence
  Synthetic oligonucleotide
uauacaaagucuuugagaa

SEQ ID NO: 3143 - RNA, 19 nt, Artificial Sequence
  Synthetic oligonucleotide
uucucaaagacuuuguaua

SEQ ID NO: 3144 - RNA, 19 nt, Artificial Sequence
  Synthetic oligonucleotide
uacaaagucuuugagagga

SEQ ID NO: 3145 - RNA, 19 nt, Artificial Sequence
  Synthetic oligonucleotide
uccucucaaagacuuugua

SEQ ID NO: 3146 - RNA, 19 nt, Artificial Sequence
  Synthetic oligonucleotide
acaaagucuuugagaggua

SEQ ID NO: 3147 - RNA, 19 nt, Artificial Sequence
  Synthetic oligonucleotide
uaccucucaaagacuuugu

SEQ ID NO: 3148 - RNA, 19 nt, Artificial Sequence
  Synthetic oligonucleotide
aaagucuuugagaggugua

SEQ ID NO: 3149 - RNA, 19 nt, Artificial Sequence
  Synthetic oligonucleotide
uacaccucucaaagacuuu

SEQ ID NO: 3150 - RNA, 19 nt, Artificial Sequence
  Synthetic oligonucleotide
aagucuuugagagguguua

SEQ ID NO: 3151 - RNA, 19 nt, Artificial Sequence
  Synthetic oligonucleotide
uaacaccucucaaagacuu

SEQ ID NO: 3152 - RNA, 19 nt, Artificial Sequence
  Synthetic oligonucleotide
agucuuugagagguguuaa

SEQ ID NO: 3153 - RNA, 19 nt, Artificial Sequence
  Synthetic oligonucleotide
uuaacaccucucaaagacu

SEQ ID NO: 3154 - RNA, 19 nt, Artificial Sequence
  Synthetic oligonucleotide
gucuuugagagguguuaaa

SEQ ID NO: 3155 - RNA, 19 nt, Artificial Sequence
  Synthetic oligonucleotide
uuuaacaccucucaaagac

SEQ ID NO: 3156 - RNA, 19 nt, Artificial Sequence
  Synthetic oligonucleotide
ucuuugagagguguuaaaa

SEQ ID NO: 3157 - RNA, 19 nt, Artificial Sequence
  Synthetic oligonucleotide
uuuuaacaccucucaaaga

SEQ ID NO: 3158 - RNA, 19 nt, Artificial Sequence
  Synthetic oligonucleotide
uugagagguguuaaauaua

SEQ ID NO: 3159 - RNA, 19 nt, Artificial Sequence
  Synthetic oligonucleotide
uauauuuaacaccucucaa

SEQ ID NO: 3160 - RNA, 19 nt, Artificial Sequence
  Synthetic oligonucleotide
ugagagguguuaaauauga

SEQ ID NO: 3161 - RNA, 19 nt, Artificial Sequence
  Synthetic oligonucleotide
ucauauuuaacaccucuca

SEQ ID NO: 3162 - RNA, 19 nt, Artificial Sequence
  Synthetic oligonucleotide
gagagguguuaaauaugga

SEQ ID NO: 3163 - RNA, 19 nt, Artificial Sequence
  Synthetic oligonucleotide
uccauauuuaacaccucuc

SEQ ID NO: 3164 - RNA, 19 nt, Artificial Sequence
  Synthetic oligonucleotide
agagguguuaaauauggua

SEQ ID NO: 3165 - RNA, 19 nt, Artificial Sequence
  Synthetic oligonucleotide
uaccauauuuaacaccucu

SEQ ID NO: 3166 - RNA, 19 nt, Artificial Sequence
  Synthetic oligonucleotide
gagguguuaaauaugguua

SEQ ID NO: 3167 - RNA, 19 nt, Artificial Sequence
  Synthetic oligonucleotide
uaaccauauuuaacaccuc

SEQ ID NO: 3168 - RNA, 19 nt, Artificial Sequence
  Synthetic oligonucleotide
agguguuaaauaugguuaa

SEQ ID NO: 3169 - RNA, 19 nt, Artificial Sequence
  Synthetic oligonucleotide
uuaaccauauuuaacaccu

SEQ ID NO: 3170 - RNA, 19 nt, Artificial Sequence
  Synthetic oligonucleotide
gguguuaaauaugguuaua

SEQ ID NO: 3171 - RNA, 19 nt, Artificial Sequence
  Synthetic oligonucleotide
uauaaccauauuuaacacc

SEQ ID NO: 3172 - RNA, 19 nt, Artificial Sequence
  Synthetic oligonucleotide
uguuaaauaugguuauuua

SEQ ID NO: 3173 - RNA, 19 nt, Artificial Sequence
  Synthetic oligonucleotide
uaaauaaccauauuuaaca

SEQ ID NO: 3174 - RNA, 19 nt, Artificial Sequence
  Synthetic oligonucleotide
uaugguuauuuaugcacua

SEQ ID NO: 3175 - RNA, 19 nt, Artificial Sequence
  Synthetic oligonucleotide
uagugcauaaauaaccaua

SEQ ID NO: 3176 - RNA, 19 nt, Artificial Sequence
  Synthetic oligonucleotide
augguuauuuaugcacuga

SEQ ID NO: 3177 - RNA, 19 nt, Artificial Sequence
  Synthetic oligonucleotide
ucagugcauaaauaaccau

SEQ ID NO: 3178 - RNA, 19 nt, Artificial Sequence
  Synthetic oligonucleotide
ugguuauuuaugcacugua

SEQ ID NO: 3179 - RNA, 19 nt, Artificial Sequence
  Synthetic oligonucleotide
uacagugcauaaauaacca

SEQ ID NO: 3180 - RNA, 19 nt, Artificial Sequence
  Synthetic oligonucleotide
uuaugcacugugggaugua

SEQ ID NO: 3181 - RNA, 19 nt, Artificial Sequence
  Synthetic oligonucleotide
uacaucccacagugcauaa

SEQ ID NO: 3182 - RNA, 19 nt, Artificial Sequence
  Synthetic oligonucleotide
cacugugggauguguucua

SEQ ID NO: 3183 - RNA, 19 nt, Artificial Sequence
  Synthetic oligonucleotide
uagaacacaucccacagug

SEQ ID NO: 3184 - RNA, 19 nt, Artificial Sequence
  Synthetic oligonucleotide
cugugggauguguucuuca

SEQ ID NO: 3185 - RNA, 19 nt, Artificial Sequence
  Synthetic oligonucleotide
ugaagaacacaucccacag

SEQ ID NO: 3186 - RNA, 19 nt, Artificial Sequence
  Synthetic oligonucleotide
ugugggauguguucuucua

SEQ ID NO: 3187 - RNA, 19 nt, Artificial Sequence
  Synthetic oligonucleotide
uagaagaacacaucccaca

SEQ ID NO: 3188 - RNA, 19 nt, Artificial Sequence
  Synthetic oligonucleotide
gugggauguguucuucuua

SEQ ID NO: 3189 - RNA, 19 nt, Artificial Sequence
  Synthetic oligonucleotide
uaagaagaacacaucccac

SEQ ID NO: 3190 - RNA, 19 nt, Artificial Sequence
  Synthetic oligonucleotide
ugggauguguucuucuuua

SEQ ID NO: 3191 - RNA, 19 nt, Artificial Sequence
  Synthetic oligonucleotide
uaaagaagaacacauccca

SEQ ID NO: 3192 - RNA, 19 nt, Artificial Sequence
  Synthetic oligonucleotide
gggauguguucuucuuuca

SEQ ID NO: 3193 - RNA, 19 nt, Artificial Sequence
  Synthetic oligonucleotide
ugaaagaagaacacauccc

SEQ ID NO: 3194 - RNA, 19 nt, Artificial Sequence
  Synthetic oligonucleotide
ggauguguucuucuuucua

SEQ ID NO: 3195 - RNA, 19 nt, Artificial Sequence
  Synthetic oligonucleotide
uagaaagaagaacacaucc

SEQ ID NO: 3196 - RNA, 19 nt, Artificial Sequence
  Synthetic oligonucleotide
gauguguucuucuuucuca

SEQ ID NO: 3197 - RNA, 19 nt, Artificial Sequence
  Synthetic oligonucleotide
ugagaaagaagaacacauc

SEQ ID NO: 3198 - RNA, 19 nt, Artificial Sequence
  Synthetic oligonucleotide
uguguucuucuuucucuga

SEQ ID NO: 3199 - RNA, 19 nt, Artificial Sequence
  Synthetic oligonucleotide
ucagagaaagaagaacaca

SEQ ID NO: 3200 - RNA, 19 nt, Artificial Sequence
  Synthetic oligonucleotide
guguucuucuuucucugua

SEQ ID NO: 3201 - RNA, 19 nt, Artificial Sequence
  Synthetic oligonucleotide
uacagagaaagaagaacac

SEQ ID NO: 3202 - RNA, 19 nt, Artificial Sequence
  Synthetic oligonucleotide
uguucuucuuucucuguaa

SEQ ID NO: 3203 - RNA, 19 nt, Artificial Sequence
  Synthetic oligonucleotide
uuacagagaaagaagaaca

SEQ ID NO: 3204 - RNA, 19 nt, Artificial Sequence
  Synthetic oligonucleotide
uucuuucucuguauuccga

SEQ ID NO: 3205 - RNA, 19 nt, Artificial Sequence
  Synthetic oligonucleotide
ucggaauacagagaaagaa

SEQ ID NO: 3206 - RNA, 19 nt, Artificial Sequence
  Synthetic oligonucleotide
ucuuucucuguauuccgaa

SEQ ID NO: 3207 - RNA, 19 nt, Artificial Sequence
  Synthetic oligonucleotide
uucggaauacagagaaaga

SEQ ID NO: 3208 - RNA, 19 nt, Artificial Sequence
  Synthetic oligonucleotide
uuucucuguauuccgauaa

SEQ ID NO: 3209 - RNA, 19 nt, Artificial Sequence
  Synthetic oligonucleotide
uuaucggaauacagagaaa

SEQ ID NO: 3210 - RNA, 19 nt, Artificial Sequence
  Synthetic oligonucleotide
uucucuguauuccgauaca

SEQ ID NO: 3211 - RNA, 19 nt, Artificial Sequence
  Synthetic oligonucleotide
uguaucggaauacagagaa

SEQ ID NO: 3212 - RNA, 19 nt, Artificial Sequence
  Synthetic oligonucleotide
ucucuguauuccgauacaa

SEQ ID NO: 3213 - RNA, 19 nt, Artificial Sequence
  Synthetic oligonucleotide
uuguaucggaauacagaga

SEQ ID NO: 3214 - RNA, 19 nt, Artificial Sequence
  Synthetic oligonucleotide
cucuguauuccgauacaaa

SEQ ID NO: 3215 - RNA, 19 nt, Artificial Sequence
  Synthetic oligonucleotide
uuuguaucggaauacagag

SEQ ID NO: 3216 - RNA, 19 nt, Artificial Sequence
  Synthetic oligonucleotide
uguauuccgauacaaagua

SEQ ID NO: 3217 - RNA, 19 nt, Artificial Sequence
  Synthetic oligonucleotide
uacuuuguaucggaauaca

SEQ ID NO: 3218 - RNA, 19 nt, Artificial Sequence
  Synthetic oligonucleotide
uauuccgauacaaagugua

SEQ ID NO: 3219 - RNA, 19 nt, Artificial Sequence
  Synthetic oligonucleotide
uacacuuuguaucggaaua

SEQ ID NO: 3220 - RNA, 19 nt, Artificial Sequence
  Synthetic oligonucleotide
uuccgauacaaaguguuga

SEQ ID NO: 3221 - RNA, 19 nt, Artificial Sequence
  Synthetic oligonucleotide
ucaacacuuuguaucggaa

SEQ ID NO: 3222 - RNA, 19 nt, Artificial Sequence
  Synthetic oligonucleotide
ccgauacaaaguguuguaa

SEQ ID NO: 3223 - RNA, 19 nt, Artificial Sequence
  Synthetic oligonucleotide
uuacaacacuuuguaucgg

SEQ ID NO: 3224 - RNA, 19 nt, Artificial Sequence
  Synthetic oligonucleotide
gauacaaaguguuguauca

SEQ ID NO: 3225 - RNA, 19 nt, Artificial Sequence
  Synthetic oligonucleotide
ugauacaacacuuuguauc

SEQ ID NO: 3226 - RNA, 19 nt, Artificial Sequence
  Synthetic oligonucleotide
auacaaaguguuguaucaa

SEQ ID NO: 3227 - RNA, 19 nt, Artificial Sequence
  Synthetic oligonucleotide
uugauacaacacuuuguau

SEQ ID NO: 3228 - RNA, 19 nt, Artificial Sequence
  Synthetic oligonucleotide
acaaaguguuguaucaaaa

SEQ ID NO: 3229 - RNA, 19 nt, Artificial Sequence
  Synthetic oligonucleotide
uuuugauacaacacuuugu

SEQ ID NO: 3230 - RNA, 19 nt, Artificial Sequence
  Synthetic oligonucleotide
caaaguguuguaucaaaga

SEQ ID NO: 3231 - RNA, 19 nt, Artificial Sequence
  Synthetic oligonucleotide
ucuuugauacaacacuuug

SEQ ID NO: 3232 - RNA, 19 nt, Artificial Sequence
  Synthetic oligonucleotide
aaaguguuguaucaaagua

SEQ ID NO: 3233 - RNA, 19 nt, Artificial Sequence
  Synthetic oligonucleotide
uacuuugauacaacacuuu

SEQ ID NO: 3234 - RNA, 19 nt, Artificial Sequence
  Synthetic oligonucleotide
aaguguuguaucaaaguga

SEQ ID NO: 3235 - RNA, 19 nt, Artificial Sequence
  Synthetic oligonucleotide
ucacuuugauacaacacuu

SEQ ID NO: 3236 - RNA, 19 nt, Artificial Sequence
  Synthetic oligonucleotide
aguguuguaucaaagugua

SEQ ID NO: 3237 - RNA, 19 nt, Artificial Sequence
  Synthetic oligonucleotide
uacacuuugauacaacacu

SEQ ID NO: 3238 - RNA, 19 nt, Artificial Sequence
  Synthetic oligonucleotide
uuguaucaaagugugauaa

SEQ ID NO: 3239 - RNA, 19 nt, Artificial Sequence
  Synthetic oligonucleotide
uuaucacacuuugauacaa

SEQ ID NO: 3240 - RNA, 19 nt, Artificial Sequence
  Synthetic oligonucleotide
aucaaagugugauauacaa

SEQ ID NO: 3241 - RNA, 19 nt, Artificial Sequence
  Synthetic oligonucleotide
uuguauaucacacuuugau

SEQ ID NO: 3242 - RNA, 19 nt, Artificial Sequence
  Synthetic oligonucleotide
aagugugauauacaaagua

SEQ ID NO: 3243 - RNA, 19 nt, Artificial Sequence
  Synthetic oligonucleotide
uacuuuguauaucacacuu

SEQ ID NO: 3244 - RNA, 19 nt, Artificial Sequence
  Synthetic oligonucleotide
gauauacaaaguguaccaa

SEQ ID NO: 3245 - RNA, 19 nt, Artificial Sequence
  Synthetic oligonucleotide
uugguacacuuuguauauc

SEQ ID NO: 3246 - RNA, 19 nt, Artificial Sequence
  Synthetic oligonucleotide
auauacaaaguguaccaaa

SEQ ID NO: 3247 - RNA, 19 nt, Artificial Sequence
  Synthetic oligonucleotide
uuugguacacuuuguauau

SEQ ID NO: 3248 - RNA, 19 nt, Artificial Sequence
  Synthetic oligonucleotide
uauacaaaguguaccaaca

SEQ ID NO: 3249 - RNA, 19 nt, Artificial Sequence
  Synthetic oligonucleotide
uguugguacacuuuguaua

SEQ ID NO: 3250 - RNA, 19 nt, Artificial Sequence
  Synthetic oligonucleotide
auacaaaguguaccaacaa

SEQ ID NO: 3251 - RNA, 19 nt, Artificial Sequence
  Synthetic oligonucleotide
uuguugguacacuuuguau

SEQ ID NO: 3252 - RNA, 19 nt, Artificial Sequence
  Synthetic oligonucleotide
aguguaccaacauaaguga

SEQ ID NO: 3253 - RNA, 19 nt, Artificial Sequence
  Synthetic oligonucleotide
ucacuuauguugguacacu

SEQ ID NO: 3254 - RNA, 19 nt, Artificial Sequence
  Synthetic oligonucleotide
uguaccaacauaaguguua

SEQ ID NO: 3255 - RNA, 19 nt, Artificial Sequence
  Synthetic oligonucleotide
uaacacuuauguugguaca

SEQ ID NO: 3256 - RNA, 19 nt, Artificial Sequence
  Synthetic oligonucleotide
guaccaacauaaguguuga

SEQ ID NO: 3257 - RNA, 19 nt, Artificial Sequence
  Synthetic oligonucleotide
ucaacacuuauguugguac

SEQ ID NO: 3258 - RNA, 19 nt, Artificial Sequence
  Synthetic oligonucleotide
uaccaacauaaguguugga

SEQ ID NO: 3259 - RNA, 19 nt, Artificial Sequence
  Synthetic oligonucleotide
uccaacacuuauguuggua

SEQ ID NO: 3260 - RNA, 19 nt, Artificial Sequence
  Synthetic oligonucleotide
accaacauaaguguuggua

SEQ ID NO: 3261 - RNA, 19 nt, Artificial Sequence
  Synthetic oligonucleotide
uaccaacacuuauguuggu

SEQ ID NO: 3262 - RNA, 19 nt, Artificial Sequence
  Synthetic oligonucleotide
caacauaaguguugguaga

SEQ ID NO: 3263 - RNA, 19 nt, Artificial Sequence
  Synthetic oligonucleotide
ucuaccaacacuuauguug

SEQ ID NO: 3264 - RNA, 19 nt, Artificial Sequence
  Synthetic oligonucleotide
uaaguguugguagcacuua

SEQ ID NO: 3265 - RNA, 19 nt, Artificial Sequence
  Synthetic oligonucleotide
uaagugcuaccaacacuua

SEQ ID NO: 3266 - RNA, 19 nt, Artificial Sequence
  Synthetic oligonucleotide
guguugguagcacuuaaga

SEQ ID NO: 3267 - RNA, 19 nt, Artificial Sequence
  Synthetic oligonucleotide
ucuuaagugcuaccaacac

SEQ ID NO: 3268 - RNA, 19 nt, Artificial Sequence
  Synthetic oligonucleotide
uugguagcacuuaagacua

SEQ ID NO: 3269 - RNA, 19 nt, Artificial Sequence
  Synthetic oligonucleotide
uagucuuaagugcuaccaa

SEQ ID NO: 3270 - RNA, 19 nt, Artificial Sequence
  Synthetic oligonucleotide
ugguagcacuuaagacuua

SEQ ID NO: 3271 - RNA, 19 nt, Artificial Sequence
  Synthetic oligonucleotide
uaagucuuaagugcuacca

SEQ ID NO: 3272 - RNA, 19 nt, Artificial Sequence
  Synthetic oligonucleotide
gguagcacuuaagacuuaa

SEQ ID NO: 3273 - RNA, 19 nt, Artificial Sequence
  Synthetic oligonucleotide
uuaagucuuaagugcuacc

SEQ ID NO: 3274 - RNA, 19 nt, Artificial Sequence
  Synthetic oligonucleotide
gcacuuaagacuuauacua

SEQ ID NO: 3275 - RNA, 19 nt, Artificial Sequence
  Synthetic oligonucleotide
uaguauaagucuuaagugc

SEQ ID NO: 3276 - RNA, 19 nt, Artificial Sequence
  Synthetic oligonucleotide
cacuuaagacuuauacuua

SEQ ID NO: 3277 - RNA, 19 nt, Artificial Sequence
  Synthetic oligonucleotide
uaaguauaagucuuaagug

SEQ ID NO: 3278 - RNA, 19 nt, Artificial Sequence
  Synthetic oligonucleotide
cuuaagacuuauacuugca

SEQ ID NO: 3279 - RNA, 19 nt, Artificial Sequence
  Synthetic oligonucleotide
ugcaaguauaagucuuaag

SEQ ID NO: 3280 - RNA, 19 nt, Artificial Sequence
  Synthetic oligonucleotide
uuaagacuuauacuugcca

SEQ ID NO: 3281 - RNA, 19 nt, Artificial Sequence
  Synthetic oligonucleotide
uggcaaguauaagucuuaa

SEQ ID NO: 3282 - RNA, 19 nt, Artificial Sequence
  Synthetic oligonucleotide
uaagacuuauacuugccua

SEQ ID NO: 3283 - RNA, 19 nt, Artificial Sequence
  Synthetic oligonucleotide
uaggcaaguauaagucuua

SEQ ID NO: 3284 - RNA, 19 nt, Artificial Sequence
  Synthetic oligonucleotide
aagacuuauacuugccuua

SEQ ID NO: 3285 - RNA, 19 nt, Artificial Sequence
  Synthetic oligonucleotide
uaaggcaaguauaagucuu

SEQ ID NO: 3286 - RNA, 19 nt, Artificial Sequence
  Synthetic oligonucleotide
agacuuauacuugccuuca

SEQ ID NO: 3287 - RNA, 19 nt, Artificial Sequence
  Synthetic oligonucleotide
ugaaggcaaguauaagucu

SEQ ID NO: 3288 - RNA, 19 nt, Artificial Sequence
  Synthetic oligonucleotide
gacuuauacuugccuucua

SEQ ID NO: 3289 - RNA, 19 nt, Artificial Sequence
  Synthetic oligonucleotide
uagaaggcaaguauaaguc

SEQ ID NO: 3290 - RNA, 19 nt, Artificial Sequence
  Synthetic oligonucleotide
cuuauacuugccuucugaa

SEQ ID NO: 3291 - RNA, 19 nt, Artificial Sequence
  Synthetic oligonucleotide
uucagaaggcaaguauaag

SEQ ID NO: 3292 - RNA, 19 nt, Artificial Sequence
  Synthetic oligonucleotide
uacuugccuucugauagua

SEQ ID NO: 3293 - RNA, 19 nt, Artificial Sequence
  Synthetic oligonucleotide
uacuaucagaaggcaagua

SEQ ID NO: 3294 - RNA, 19 nt, Artificial Sequence
  Synthetic oligonucleotide
acuugccuucugauaguaa

SEQ ID NO: 3295 - RNA, 19 nt, Artificial Sequence
  Synthetic oligonucleotide
uuacuaucagaaggcaagu

SEQ ID NO: 3296 - RNA, 19 nt, Artificial Sequence
  Synthetic oligonucleotide
ugccuucugauaguauuca

SEQ ID NO: 3297 - RNA, 19 nt, Artificial Sequence
  Synthetic oligonucleotide
ugaauacuaucagaaggca

SEQ ID NO: 3298 - RNA, 19 nt, Artificial Sequence
  Synthetic oligonucleotide
cuucugauaguauuccuua

SEQ ID NO: 3299 - RNA, 19 nt, Artificial Sequence
  Synthetic oligonucleotide
uaaggaauacuaucagaag

SEQ ID NO: 3300 - RNA, 19 nt, Artificial Sequence
  Synthetic oligonucleotide
cugauaguauuccuuuaua

SEQ ID NO: 3301 - RNA, 19 nt, Artificial Sequence
  Synthetic oligonucleotide
uauaaaggaauacuaucag

SEQ ID NO: 3302 - RNA, 19 nt, Artificial Sequence
  Synthetic oligonucleotide
ugauaguauuccuuuauaa

SEQ ID NO: 3303 - RNA, 19 nt, Artificial Sequence
  Synthetic oligonucleotide
uuauaaaggaauacuauca

SEQ ID NO: 3304 - RNA, 19 nt, Artificial Sequence
  Synthetic oligonucleotide
gauaguauuccuuuauaca

SEQ ID NO: 3305 - RNA, 19 nt, Artificial Sequence
  Synthetic oligonucleotide
uguauaaaggaauacuauc

SEQ ID NO: 3306 - RNA, 19 nt, Artificial Sequence
  Synthetic oligonucleotide
auaguauuccuuuauacaa

SEQ ID NO: 3307 - RNA, 19 nt, Artificial Sequence
  Synthetic oligonucleotide
uuguauaaaggaauacuau

SEQ ID NO: 3308 - RNA, 19 nt, Artificial Sequence
  Synthetic oligonucleotide
uaguauuccuuuauacaca

SEQ ID NO: 3309 - RNA, 19 nt, Artificial Sequence
  Synthetic oligonucleotide
uguguauaaaggaauacua

SEQ ID NO: 3310 - RNA, 19 nt, Artificial Sequence
  Synthetic oligonucleotide
aguauuccuuuauacacaa

SEQ ID NO: 3311 - RNA, 19 nt, Artificial Sequence
  Synthetic oligonucleotide
uuguguauaaaggaauacu

SEQ ID NO: 3312 - RNA, 19 nt, Artificial Sequence
  Synthetic oligonucleotide
guauuccuuuauacacaga

SEQ ID NO: 3313 - RNA, 19 nt, Artificial Sequence
  Synthetic oligonucleotide
ucuguguauaaaggaauac

SEQ ID NO: 3314 - RNA, 19 nt, Artificial Sequence
  Synthetic oligonucleotide
ccuuuauacacaguggaua

SEQ ID NO: 3315 - RNA, 19 nt, Artificial Sequence
  Synthetic oligonucleotide
uauccacuguguauaaagg

SEQ ID NO: 3316 - RNA, 19 nt, Artificial Sequence
  Synthetic oligonucleotide
cuuuauacacaguggauua

SEQ ID NO: 3317 - RNA, 19 nt, Artificial Sequence
  Synthetic oligonucleotide
uaauccacuguguauaaag

SEQ ID NO: 3318 - RNA, 19 nt, Artificial Sequence
  Synthetic oligonucleotide
uuuauacacaguggauuga

SEQ ID NO: 3319 - RNA, 19 nt, Artificial Sequence
  Synthetic oligonucleotide
ucaauccacuguguauaaa

SEQ ID NO: 3320 - RNA, 19 nt, Artificial Sequence
  Synthetic oligonucleotide
uuauacacaguggauugaa

SEQ ID NO: 3321 - RNA, 19 nt, Artificial Sequence
  Synthetic oligonucleotide
uucaauccacuguguauaa

SEQ ID NO: 3322 - RNA, 19 nt, Artificial Sequence
  Synthetic oligonucleotide
uauacacaguggauugaua

SEQ ID NO: 3323 - RNA, 19 nt, Artificial Sequence
  Synthetic oligonucleotide
uaucaauccacuguguaua

SEQ ID NO: 3324 - RNA, 19 nt, Artificial Sequence
  Synthetic oligonucleotide
auacacaguggauugauua

SEQ ID NO: 3325 - RNA, 19 nt, Artificial Sequence
  Synthetic oligonucleotide
uaaucaauccacuguguau

SEQ ID NO: 3326 - RNA, 19 nt, Artificial Sequence
  Synthetic oligonucleotide
cacaguggauugauuauaa

SEQ ID NO: 3327 - RNA, 19 nt, Artificial Sequence
  Synthetic oligonucleotide
uuauaaucaauccacugug

SEQ ID NO: 3328 - RNA, 19 nt, Artificial Sequence
  Synthetic oligonucleotide
acaguggauugauuauaaa

SEQ ID NO: 3329 - RNA, 19 nt, Artificial Sequence
  Synthetic oligonucleotide
uuuauaaucaauccacugu

SEQ ID NO: 3330 - RNA, 19 nt, Artificial Sequence
  Synthetic oligonucleotide
caguggauugauuauaaaa

SEQ ID NO: 3331 - RNA, 19 nt, Artificial Sequence
  Synthetic oligonucleotide
uuuuauaaucaauccacug

SEQ ID NO: 3332 - RNA, 19 nt, Artificial Sequence
  Synthetic oligonucleotide
aguggauugauuauaaaua

SEQ ID NO: 3333 - RNA, 19 nt, Artificial Sequence
  Synthetic oligonucleotide
uauuuauaaucaauccacu

SEQ ID NO: 3334 - RNA, 19 nt, Artificial Sequence
  Synthetic oligonucleotide
uugauuauaaauaaauaga

SEQ ID NO: 3335 - RNA, 19 nt, Artificial Sequence
  Synthetic oligonucleotide
ucuauuuauuuauaaucaa

SEQ ID NO: 3336 - RNA, 19 nt, Artificial Sequence
  Synthetic oligonucleotide
gauuauaaauaaauagaua

SEQ ID NO: 3337 - RNA, 19 nt, Artificial Sequence
  Synthetic oligonucleotide
uaucuauuuauuuauaauc

SEQ ID NO: 3338 - RNA, 19 nt, Artificial Sequence
  Synthetic oligonucleotide
uuauaaauaaauagaugua

SEQ ID NO: 3339 - RNA, 19 nt, Artificial Sequence
  Synthetic oligonucleotide
uacaucuauuuauuuauaa

SEQ ID NO: 3340 - RNA, 19 nt, Artificial Sequence
  Synthetic oligonucleotide
aauaaauagaugugucuua

SEQ ID NO: 3341 - RNA, 19 nt, Artificial Sequence
  Synthetic oligonucleotide
uaagacacaucuauuuauu

SEQ ID NO: 3342 - RNA, 19 nt, Artificial Sequence
  Synthetic oligonucleotide
auaaauagaugugucuuaa

SEQ ID NO: 3343 - RNA, 19 nt, Artificial Sequence
  Synthetic oligonucleotide
uuaagacacaucuauuuau

SEQ ID NO: 3344 - RNA, 19 nt, Artificial Sequence
  Synthetic oligonucleotide
uaaauagaugugucuuaaa

SEQ ID NO: 3345 - RNA, 19 nt, Artificial Sequence
  Synthetic oligonucleotide
uuuaagacacaucuauuua

SEQ ID NO: 3346 - RNA, 19 nt, Artificial Sequence
  Synthetic oligonucleotide
aaauagaugugucuuaaca

SEQ ID NO: 3347 - RNA, 19 nt, Artificial Sequence
  Synthetic oligonucleotide
uguuaagacacaucuauuu

SEQ ID NO: 3348 - RNA, 19 nt, Artificial Sequence
  Synthetic oligonucleotide
aauagaugugucuuaacaa

SEQ ID NO: 3349 - RNA, 19 nt, Artificial Sequence
  Synthetic oligonucleotide
uuguuaagacacaucuauu

SEQ ID NO: 3350 - RNA, 19 nt, Artificial Sequence
  Synthetic oligonucleotide
auagaugugucuuaacaua

SEQ ID NO: 3351 - RNA, 19 nt, Artificial Sequence
  Synthetic oligonucleotide
uauguuaagacacaucuau

SEQ ID NO: 3352 - RNA, 19 nt, Artificial Sequence
  Synthetic oligonucleotide
uagaugugucuuaacauaa

SEQ ID NO: 3353 - RNA, 19 nt, Artificial Sequence
  Synthetic oligonucleotide
uuauguuaagacacaucua
